United States Patent Application Publication US 2022/0008368 A1 - sequence listing, part 26

SEQ ID NO: 2 - DNA, 58617616 bp, Homo sapiens (residues 54,275,576-56,446,598 of 58,617,616)
  modified_base (1)..(60000): a, c, t, g, unknown or other
  modified_base (24448981)..(24498980): a, c, t, g, unknown or other
  modified_base (24552653)..(24552752): a, c, t, g, unknown or other
  modified_base (24891257)..(24891356): a, c, t, g, unknown or other
  modified_base (24895791)..(24895890): a, c, t, g, unknown or other
  modified_base (24898314)..(24904771): a, c, t, g, unknown or other
  modified_base (24908590)..(24908689): a, c, t, g, unknown or other
  modified_base (27190875)..(27240874): a, c, t, g, unknown or other
  modified_base (58607617)..(58617616): a, c, t, g, unknown or other
gtgtctgcagctcccatggggagcctgatccacagtgagctccctgggaacactcactggttgaatgaatgaaggggagcccaggggaccggggtggttcatttattcctcatcctccagaggcctggggagcgctctaacaaccagacggccaaacagaggatgaggagcaggaaggggacccgggaggaggcccacgaggtcccaggacagcaggagagagtgaggtcacagcaggcgggaggcagcgtgctggacaaggaggggtccaccgtgacgatgctgagagccgggggaaggaggacagagaagtcctgctggattagatctggcaccaggaggcctttggtgcctgggacaggggcggggtctcacccgagtgtccatctccaccccatcttcaggctgtgtgtccttcacggcagcatctgctggggcagagcaaggggttcgtctcttgggaaggttccctgggacctctgagtcctgccagcccctgccctgctcccagatggggctactgagatgcagggaggggctgcaatgtccctgaggtcccacagtgtggggtgagatgatctcaccctgagccccagaccctttccagccggtgcccctttccccattgctacggaaacttcggggcccctatctccctcctggctggtcacctcttcctctcactcacagaggttttcttcctgggcgtcggcagctgggctggacctgggggaggaatgggagctttaggggcagtgtatgggccacgagcaggtgggagtctggggtcttcgggcagaattacctccactgcaggcctctgtctgtgggctctggccccacagcccctgcaggatgttggaaatcagcctttctctgggctgggggaagaaggacagagcctcagccctgggaacattggagccccctgccctgcacacacagctcgaaggtaaggaaggaaacctaaaaacactcctgcctccatgttccaaatgcctcatgagatggacagagtccgaaggacactttacatttgtagatgggactgagcccggaggacactttatatttgtagatgggactgacgttaagtgctttctccattcacctggtgagaaatgctggaacagtttctcaaagctgcatttgcccagtggtttggattctctttggctgtgccctgagcccaccctcggtcggcccacagggtttccccttccctactcactcgatgtccagtgtttgccctgacgtcgatgtcggaggatgaggaagaggaggaggaggaggaggagcagtaggacgacggccaccaagatgccgatcacaacccccaggtgccttcccagaccttgagcacgatgatgtcagggatgggggtgatgtcattgaaatgagcgcctactgtgtgcaggtgactgctggaccttctgttcaccacctccaacccccacaacagtcgtgcagcacacaaacatccaccccacccactctacagatgaaaaactgacgctcagagaggggaatcgcctgccccgggcccccagccaggaagcggcagagctgggaagggagcctgggagtctgacctgcagcccttgttcctgcaccagagccgagccccggagctgcagggaaagagccttaccgtcctgaaccacgactctgctcccctcccctgccccaggtcaccgtctctgctgcaggtgggacgggacaggcccccgcggaatcgagtcttggagtcttccctgaggggcctcctctcccaggaggtcacagctgggagtgagagctgaaaggaactttcccacctgcaggcctctctcctttacacttggagaaactgaggcccaggcaggggaggagcctgtctacatcaccacctccagaggagcctgaacctaggacagaacccacccctgcctccccgggaccccgcccacctcccactcagagcccctcactcaccactttggggatccgacccagtgggggtgaggggctggtcctcagggcctgctgggtcaggacggggaggtgagggctggggctgccctgctccccacatcagcccggctgctcctcccccaggctgggccccaacatttctctctgccttgaccccccacccctcaccagcccagcctcagagccctggggaccctgtggcccctcctctggctctgcccagctccctggacagaagcccttgattgagtccctgaagggaatgggatcctcctggacactcaaagctgccctgggggtcgctgcgctcccttcgagccagaggcctcagggactcaccaggtgtggagatgggaccggtgggtggggggctggaacccatggagggtcctgggtgaaagaatgagaggagggtgaggagctggggctttcctgaagtctccacctcaaaccaaatttctctacatgggccctgtggcctccccaggcccctccctccacccgcctctcctgtccatgatgctggcgatgccgctgagtgtgcgcaggcctgggagggcctgttgtcctccttccctctgagggtgagtctcccactggctgagccccgctcagacccccgctcactccatcccagcccagagctctcctggggggcagggcctgagctgagcctttgagctcagagaggacagggtcaaggcccccacctgagaccacgagctccaggggctcactggggtgagacagcaggtaggggtcggagttgagtgagccgtagcacctgtaggtccccgcgtgggctgaggtcacaggactcatggggaattcagcctggtacttaggatattcgtgtattgatcttagacggagtggggcatcagctgctcccgccttggtcagaaggaaagtgtggaactgccgccatgactgacacagcagggtcacgttctctcctgaggccactgtggggcctggctgcactgagatgaagggtgtgccacggatctgtcctggagagaagaaggatgggtgaggggctgccccaccttgctctgagctgagacctccccaggcctctctaggagcctctgtctctgttttctctgagtcttcccctccccacccatcccctgtctctctctctgtctctccctcccttgggaccaccccccgcctcatcctggccatcactaattggattcccccggcagggcctgtgcagagtctgggtccctgactgaacccgctgggctcctcacctgtgatcaggatgtccagggggtcgctgggggccgagcactcagaggagaggttgtgtgcaccgtagcatctgtactggcccccgtaggagcggctcacagggcccagggtgaagttggcctgggagagcccagcctggggctgccggccagggagctggcgaaggtcacgttccccctccttgtacagaacaaatctgtcatagccgacatcagagacacactggagggtcaggctttccccaggggccatgacaggacccggctgcactgagagtgatggcttcttagaaacacctgggaaaaggtgctcatggtttccaggagccgaccctcaggcttccccacaaaccctccctctcccccggtgcctcaccactgctgatcttcctgtgtctctggccccaggacccctgagccctctcgccccaacatcatcccacctggaactgccctgagacacggctgctccccacctgcctggagactcagggagactcagggaactccagacaatgctgtgaatttctcacctgggaccaggagctccaggagatcactgggtgaagaccacacatagggagagttcaagtcataaccatagcacctgtgcgaccacctgcgattcgggctcacggggcccacggagaagatggcgcgggacgacccacgggcatggggctgggagttcaggcattgtgggtgttcatcttctccttccttacacagaatgaagccgccaaatgccacctgtgactcacactggagggtcacccttcctcctgaggtcaccacagggctgggctgggctgagagggtgggttttgggtaggctcctaggagagaaggaggcatcgtgttaaatggggctcccacctcccacatcatccccagggctgggctgtgagagggagacacccctgagagcctccttcctgagggcagagcctggggctgggatccctgagtgtcctctcacctgtcatcaccagcaccagggggtcactgagctcagaccaccgagcgcggctgtaatactgacagccatatcgccctgtgtgttcccaggtgatggatgggatgtggaactggccgttcttcacaagctctggtcgtatccgtgtaatccaagatgctgattttttctccctatatagacggtactcctgggcttcaaggctcccctgacaactgagggtgacgggactcccctgggtgatcacagagtctggctcagcccacagggtgggcttggggatggtccctggaaggaaatcaaaggtcagattcgaagtcatttcccacccaacagatctcagctctcagcccaggaccctccagatgcccccatcagtcagtccagaacttctaatccccatccccagctgcacggaggtggccccttgtccccagtgaggaggagggacctgggagagctggggacagactcacctgtctgcacgcgggtcctggggcccagactcagccctggaagagagttccctgtgagggatttgccccctgaagcctgagcaggtcctcccctccctgggatctttgtgagcccctggggtctccttagggaccagagtttggctgtggggtgaggtccctcctaggttagaagctcccctctctcttcaaatctcaccgagacagatcaggactgtgacgatgggggtcatggcgtctcctcccactgccctgctctgcggatggatgagccctcggtgctggcgggacagagacacacagagagaaatagcctcccctccttcccaccctgtgtggacactcagaggctgggtccttctcatggggtgttgtcatctgcagccacacaagaagcggaactgccctcccaggagcctgactctcattcttttagagctgaggtgggggcaggcactgggccctctgcagacatttcagactgtaatggggtctttcctgacccccagccactgtctgtctggtttctcctcgtctcaccgagagccgggatgtagcagcaaatagaactggtgcttcttgtgtctgcccttcctgatgagggtagcagtggcttccccttccttctcacagcttcccacatggtcaccctccctccttcagcccatccatcagcacagcgttgtggggtccttaccatggcagtcgtccctccagccctggagatgcttcagggaagacccaggtccatgctgcaggcagactcagatcagcagagaagcatctcgcctctggctgtgctgtccaggttgagctgtgtgtggcagtgagcacagaggagaaatgcagggaagtaggggaagaaaagttgacttctttcttgacactggattgtgggttttctttcaaccaaatagtcccctcttaacttcccctttttaaatgtttttgctccagcgtccactccctcccccccgggaagaaacctctgagtctttcctgcctcctcggtgcccattgcgtccttagccgtccctctgcacctcaattcctggtcaacattttgggaacaatgacttatgtttgagctttgatttggggagtgggggagggagttgatatttatttgatgactggttatcatccgctgcctacgtgaccttggtttgtaatgtcccatcactgagcctcagtttcttcctttgcagattgttgtcatgaatcccactcgtcacagtggttgtggggtcagtggtgcctgggacattgggaggggctcatttgtgcttgatttccagaccagggtaagacctgaggctttgggacgtgagaggatcttgctgttggactccacattctgtaggtgattgatgagtccactcaagatgtcacatctgaccgtaatggagaaacgtatgtgtagcatttctgaaatacccagagtatcaaggtcatgagcagaaaaagacatgtggaaaccccaagtgtagacggactcacaagaaagaacagaggccagaggtgagatgccacagggtcccgggaccatcaagggctcattagggtggaggtttccaccactgagtggagccgggagaggaaccccgggatctgcaatgacagtgaggggctcagggctccagaccaaggtgggaggctgcgtcctctagctacacctgaggctggagtggaccccaagcagcccaggggaattccctcaagggagtgcaccaaactgtccagacctgctggaattccaaggaaagaagcactaaacaccagggtgttcatagagcatttattagggggacctctgcacagtggggcatccttgtcttcttgcccagtgtctccttgtggatctcaaggatgtgcttccacatagcagcatgttcttcagatggacaaggagacactgggtattctatccaaagctttaacctaaaataaaaacaaaaccaaaaataaacccctagaaaatatgatctctcagtacagttgtttcttgggatacacaggcaattcgtttcagtaccccctacatgtaccaacacttgctcgtactccagccctgacgttgtctctgctgggtctgcatataggaaaagtctgccgttcatatacgcaagtcttgtttctcacaaatgctatagttttgatccccgtttgtttggaaaaagtgtgcatataagagacccctggaattcaaggctgcattgctccagggttgcctggattttgagtttatttgggagtgagaagcaaggattacaatatggagtgcatggcatggcaagccacagtgtgtccagagagggaagtgtgatgttgtgatatatgctggttttcacccgcagttcctggcttgtaactcccatagcccttgttatagtcttttgttataacattggctgtgctgggcctcaggggaggcctctgacctcctcctgcccttccttcacctaacccaaagtaagactcgaatgttccctgcctttctgatagtggatcttaagaccctcccagaagacagtctcaccctgttccttgtgggaggaaatgctgatgtcatgaagctttcataaaagccccagaggactgggtttcatgagtttctgggtggctgagcatgctaaggctcctggagggcgacgcccagggagggtatggaagccccgggcctcttcccccatgcctcctcctatgagtttcttcatctgtgtcctctgcagtgtgctttgtattcaaccaggaaatgtcagtgtttcctgagttctgtgagctgctacagcaaattaatcaaacccaaagagtggggcatgggatccccaacttgaagccagtcagtcagaagttctggaggtctggacttgggaatggtgttgggggcagttttggggaatgggccttcaatctgtgggatccgggactgtctctgggtagacagcaccagagctgacttagaggacacccagctgctgttcgctactgcgtctggggaaaaaaaccccatacatctggtcctagaagtctttttctgtgttgatgattcctgtgacgtgagagtagaggaaaagcaccgtagagagagctctctgtacatagagaggtaaaggaagttcttatcagcaacaagggagagcctgacagagctgcctggaaacagagttccctggttccacaggttcaaagccagagttgctgtcagtccattggaggagatgctgttgctggtcaatggttctcttgagagcatcttatctgaattcctgacgtcctaaagaacatctagtgataaaccttgtcaaagcagaaggggctgaaggacatggaagagtttcttatgggttttttaaaagtccttagaaacagttcttatctgagacgtggaagcatgggcctcctctccttcaggccttcctggccctgtggggtctgagtttgaccaaagtcatctcatccttgcacctgtaacttttctattgggagtctgcagtgaagggatggggttacgaagtttaacctgagagtttcaggaatttggttcaggggagggcttgtttctacacttttagcaaaagggttaatttttcagtgttttctagaaacaacctaaagtgctttatcagtacttggggatgctcaagacctcagcttgggttccagcctgcaggtggaaacatgcatctgtccaacccacagaacagtcatggccctttgtctcactctcagaacaaggaaaaaagtggaggaaactgtgggaccttagagactgtgactccccctcttctgtgtttgtggacagaccctgggatgactcagtgacccgggctacactcagcactgagccaccttcccgggtgtgcatgacacagatgcgctttatcattgttggaccgggcatctctgaccctggagtgtgaggctcacatggaccccgccatgccgggcataacacagaggtgattctaagcttgggagcatggacaccgcagggcaggagcggctacagcaatgccctcatcagctttccttcctgagtcagcctggggagaaaccctatatggaagatcaggtgtgtgggagaaaaacccaccccagaggaataaaaatcaaagagtccgttagagaaaaaacaggcaattgtagaaatgaattaggaagctattgtgatgtgaaaatagtaaattatattaacacatttagaaataatttcatccagaacaagacacagctgaaatgataaacattgtattggtgtagaatatttactaaaatttttcattagtcatcagagaaaaactagaaatgaaaaaaatagaaaagataattaatgcacacaagaaatggaatgaaaagaggaaacagatatctctctttggatcacactttcagaatgaaggaaataaggagtatgttattcagtaaatacttgcaaagaaaatggttgacatttttatagaaatgaagaaagaacatgagtttaacgtgaacaaattcataaataacatcaatgtcttaactatgatagagtaaaagatacctagaatagatacaaagtaattttaaaactactggagaaaatgaaaattattgtccaatgaaagacaagcacattgggactggatttcccaagagtaaaaagtgcaagaaaatgactgggggctgaggttcaagttggctgaatggaaagggctggagtctgcctactcactaagaggacccaaaatagcgagtaaataccaacaggtcaagtggatcttccaagaggatgctggggttcacctgagaaacatgaggacatggagagaagagaagagaaaaggtgggagccaggagaggctcctaacacggggaaggggtgagtgagtgagagattcaccaacacggggaaggggtgagtgagtgagagattccccaacacggggaaggggtgagtgagtgagaggatccctaacacggggaaggtgtgagtgagtgagaggatccctaacacggggaaggggtgaatgagtgagagcctccctaacacagggaaggggtgagtgagtgaggggtccctggcatctacacctctgctgtgggcccttaggatcctgcccacaggagagcgcctgtcccctctgggcctccagaggcccacagtttgctcctggagactgtaccaaggccccactggagcccacgtggaatcccacaggcttctgatccctgagcagcctgggtccagctgccactgccttagcagggagggaggaggccaggcacctctgtgggccccagaataagtatgacagctggggcacaggagcagccaagctgagcaccacacagctgcccacctctgttgcttcctgcgaaatggggcttccttcctgctaatggggcttgccagctgcagggccccagtcacccgtcctgcccccacccgaacaccgtggccctggctcggtgccctctgaaagcccaatgctcagaggcccctgacaagccctttgcagtcactgccacctctgcctctgcccctgctgccccaggcccagggagggtgtggggaggcctggcactttcacgtgtccccagagcaaaaccgagtgacacttcttcaggagggaagtgtgagcgggccctgtgcctcacagctgccagtctccagtgccccagccgaggggcgctgccctccctagtgacaggcccacagcacagccaccctgcccccacctggacatttcagctgcagcccccagcccttctgagagcccagtccccacaggcctgtgatctgccgcaggctctaccacctgagccttctgcctgccccgcctgaaggttctgccggtgacctggggaccagcccatccctccccatcacagccagcatctgaaccccggagcagccgaaacccagtccagccccttcaggactcacacacgctgtccagccggccacctaggggcctgtgatccgggaactacctgccctttcctacctgctggcacctgaccactcaccccagggcctgaggtcgggcccacccagccagcaacaccaccacaactgacgtccactctcccatccagagaggcagaagccccacatcccacctacatgaagcagctaccgcgtcagacaacagacagccgctcagggtctgcactgggctgagggaggaggctctgccttggaaccacgcctgcagagagtggcaaggcaggtgtttcccactgccctcagccacactgtggcctggggagagacaagagtgtgtgtctgaactgagactcatgagccctggagcacgggtgtgatagggagacagacaacgttcctccctatgggactggaaacggtgtagctccttcactccccgcagagacctcagggcatttcactaggagctgctccagccatgtccatcaggactagtgcctgcactcatcactgggatatctgtgggcaagccgggggttccagctctgcccaggggtgttccctcgcccctgtggaacaggaagctcagggcacctgacactccacggtccagcccttcccctgaaacaagagtcagcacctcacaggaaacacaccaggtccacatccacctgcttgtgccgagcgtggctcttacccttaagcaccagctcctggcctgcaatctgagctgcacagcccaatgcaaaccctgctgcagaagctcccaaagccatgggaaaagccaaaagacccttcccaacatgctctacagtcaccctccctgcggggctgggggaaaatgtgcaaaagaaatcccatccaaacgaaaataaattcgaagagagtaagtggaggcctctccagatgagaaggaatcagtgtaaggattctgacgccgtgaaaaatctgaatattgtggcaccaccaaaggatcgcactggctcgctagtgatggatgctgaaaacaatggaaactctgaaaggacagataaagaatgagactgacacaaaaacattacaaagaatcaatgaaagaaaacgttggttttttgaaagtataaataaaattgagagatggctgactacactaaccaaaaaaaggagatttaaataagcacaatcagaaatgataaagttgacattacaaccaacaccacagagatacaaaagatcatcagagactactatgaacacctttatgcacataaactagaaaacctggagaaaatagatgaattcctagacacacacaacttcccaagattgcacaggcaaaaaatagaaactctaaacagaccgataacaaccaatgaaaaaggatcagtactaaaaatcttccagcaaaaaagtccaggaacagatggattcgcagttgaacttagctgtatgtacgaaggagggctggtaccaatcatactgaaagtattccaaaaatcaaggaagtgggattctttgccagctcattttacaaaatcagtatcatcctgatagcaaaatcagacaaggatccaacagaaaaataaaactacaggccaagaaatctgaggaacacagatgcaaaaatcctcaagaaaatactagcaaacggaatctaacagtgtatcaaaaacataattcatcatgatcaagttggcttgattccagggaagaaaggatggttcaatatatgcaagtcaataaaagtgactcatgacatgaactaagaacaaaaagcatatgatcatctctatagatgcagataaagctttcaagaaagtccaacatcgcttcgtgataaaatccctcaacaggctaggcatgaaagaaacataccgcaaaataccaacaccccctgcgtgacaaacccacagccaacatcaaattgaatggggagaagtgaaaacattttcccaggaaaatgagaatgggatcctccctagcccctggggtctcctactggaccagggcctatctgtggggcagggtccctctcatgctagaatctccctttcccctcgtcaaatctcagtgaagtggaccatggccatgggagtgacagtcatggcacagagaggcagggctctcctgtagcaggacgagccgcagacaaaactcctcagacaccggattaaagaaggaagaggtttttattcagctgggagcgtgggcagactcgcgtcttaagagccgaactccccgaaaaagaaattcttggcctttttaaaggcttataactttaaggggtccacgtgaaagggtcgtgatacatcaagcaagcgtgggaaacatgactgtggggggctatatgcatcagctaacagaacaaaaagttttacagtgcttttttcatgcagtgtctggaatttacagataacaccagtagtttaggtcaggggttgatgttattattattactttttttaactcctacggccgggtggtggtgccaaggttgtctggctatttatcttacttttgtatttttccaacttttggctttttctctcttcctgttttgtgaactaggcaaggtggggggaggagggcagcaggagtagtagtggtctccttccttactcccacttacaggattttcccaccagcatctccatgggtggtgagctgtcccggaccccgctggctcatgttttcccaggacttggcctttctcgaatgctttatctgcatcgcttgagattatcacatgctttttgttcttagtttatgtcgtgagtcacctttattgacttgcatatattgaaccatcctttgagacaggcaccaggctttctgctgatatttcagacacgcatggcatctctcctgatctcctttcactgtctgcctgacatgtcctcgtctcattgagggccgggacgtagctgcaaatggacgtggtgccttcctgagttggtcccttccaggtgaaggcaacggagggttcttccttcctctcagagactcctcgtggggtttccctctctccttcagctcacccataaacacacccttgtggggaacctaccatggccagtcttctcaccagtcctggggaagcttcagggaagatgcaaattcaggctgcggggcagactcacatcagcagagactcatctcgcatcttgctgtgcagttccagttgagctttattgtggcgatgaacagaaaagggaaatacatggagacaagggaaggaatcatgactctttccccagaactggagtgtgggttttctttatgcaaaaacgttcccttcacgaacttctcattcactcatcgcaacagcatctgcccccgtctccctggaaacaacattgacctgactctgccttcttggtgcccctgtcttctttcaaacactcctgttcccatcctgtgctcctgagttcaaggttctgggacaatacgtggggttagcactctgctttgaggggaaatcttgtctttatttaaatattcatgtgtcaccccctgcctgtgtgaccttgggcagtaacctcccatttctgagcctcggtttcctcatttggagcctgtgatgaaccccatttatcacaggggagctgggtcattggagcctggggactgcagggggctcagccatgggtaatttccagagcaggtgaagacaggaggggtgggggcatgaagggatgctggcgcccaccatcaaggcctgagattgatgtttccactaaggagagcccctttgttcctgcccttgagagatgcttctcataatatttcatcaacacccccgttatcacagtcatgtccagaaaatgagaaatgaaagcttgtcagaaggagaagcgcctgcattaaagagaaaattaaaactgacagagcatttgtgtctggtgccattggggtcttcagggaggaagtaattaagtcactagtgtgcatacatttaagcatgaaatgcaaatcttttttttttttttttcgagacagagtctcactctgtcgcccaggctggagtgcagtggcacaatctcagctcaccgcaacctccacctcccgcgttcaaacgattctcctgtctcagcctcccgagtagctggcactacaagcacgcaccaccacacccggctaatttttgtatttttagtaaagatggggcttcaccacgttggccaggctggtctcaaactcctgccctcacctgatccgcctgcctccgcctcccaaagtgctgggattacaggggtgggccaccgcgcctggccaaaatgcaaatcttgacctctcatgataaactgaaaaataggagtaaattaaaaaatacatatgctagactgaattatgtaatttaaaatgcatttttgtgttttgtgattttcaactcaacatgtcaatagcattgcttctcagtgggactggacttcccgatagtaaaaagataagggaaggagatgctaagagagtactctcaggggactaactgcaagtgaggaattctatacttactcaggttaatacctgaaaggtaaaggggtcagcaggggaccaattcctaaacagaagaaggctcagggcaagacggacctgtgaagctgtctggttgggcttccccttcgtgagggctgaggagggattggagggtggatctctcaaatcatcagatgtgctttctcttccaggtgttatacttaccctttaactaatacagaaatgttttcatctattttgatagagagagtgggaggaaaaagaaggcattttctgagctgcaagttactagatattactgttttcatgctcagtgaagg[187 bp omitted]tggtggtgggcgcctatagtcccagctactcgggaggctgaggcaggagaatggtgtgaacctgggaggcggagcttgcagtgagcgcagattgtgccactgcactccagcctgggcgacagagcaagactccgtctcaaaaaaaaaaaaaaaaaagaatcaatgaatccaaaatgtagaatatgagatgccacagtgatgtaagtgagaaacaggcaagtatttgaaaatcacacacagacatgcccacatgaatgcaaccacacacgggcacacatgtatgagtcagtgtgcatgtacacatgtgagtactcagagttcagctacagtggaattagaacgtgtcttctctaaaggcaaggataaatgaatcctcattcgaaaatatataattgagtgaatacttaactaaataggtgaagttattccaaatttttctttttttttaatcctgtatgtaaaagagtaattcatccactgaaggataagttaaatagcccagtaccccaatcacacctaggcatgaaacacaatagtaccatctaaaatgaaatgataatttacaatcagtaagtgaagaaaggtatactagtaaaatatctattggaaatattaatattcaacaaaatgtaacataatccaaaaagttttagaaataaaaactaaaattttgtgttttaatgaagttgtaagggctgggcatgaagggatttgcaggctgagcggggaggatcacttgagcccaggagttcaagaccagccagggcaaatagtgagactcatctttatttatttttttaaaaaaagaaggtattaaagatgactgggaaaaatcactgtatgaaaaaccgaggaagaaggaattagggctcccgaatggggtgaagacccacatgcagaatgtctctgagccctgagagtggagcagtgtgttcaggatcctgagcctgtggaaccaacattctctgagatgtgagtctatggaatgtgtgttataagacctgccttttgttagtataatccagcaaaagcccatgggcgaggacccagttttattttagggaatgtggggacagtatattttctatttgtgtttatgcaaatttcatattgctgatcagtcatgcagaaggcggaggtcagtgtgttcacaggattcgtacccgagagtctggagacacatgtgggggtccatgggaaaggctggtggccgggtatggtgggaaggtaatcagcgacagatgccagagtctcctgcttgatcttgccgaaatctggctcaaatgtttggcctggcacaaccaaactagaacttggaagacgctgtataggtaaaacataatattgtaatcattcatattctgttaaggctttgaaaatgtccttaataagatttctttatcctggaaggtagatggcaaatgataacatttctttattctagagggtagatggcaaacgataagatttctttattctagaggttagatggtgaatgatatgatttctttattctagagggtagatggtgaatgataacatttctctattctagagggtagatggtgaatgataagatgtctttattctagagggtaactggcgaacgataagatttctttactctagagggtagacggcaaatgataagatttgtttactctagagggtagatggtgaatgataagatttctttattctagagagtagattgtgaatatttggtccttcatgttttctcaggatcctccctccaaacattctatcctatacagcaaagctttacatccttcaaacacaacagtcgtcttggacctagatatgttgaactctttaatgctaggactcaagtcctcttgctgtttgggacaattcagaaaagaatcagccccagtcattttgcatacttctgtctgactgtcataggtgagtagaaagaaacagctcaactgcttgacaagattcatcgacctgaggtcttgtctgcagctggatttctatcctacttccgtgattttcctttcgtggatcaccaacacactgcaaatgcctatcattgcttttgacgtggtgtactttggttctgcctggaaaggcaggaagtctcgaagtgaggagctcacaggtcaaaggagattgaaatgttttcagacagaataggcaaatccgtagagacagaaagcacacttgtggttagcaggtgctggagggaagagggaatggggagtggctgctgaatgggtgtaggatgatgacaatgtgtggaacaggatggcagtgatggttacacagtgatctgaggagaagatacacaggtagcatctgagaaggagggaagggcttgtagggtttggagagggtgtcagggcatcagggtggatttatcttttcctggttgaaatctgatactctcccattgatttagttactgaagcacgtttggaactctgaactgaagagatggaggctcaataaagcacaccagggagtatggcaatgaggaataaagaagactgtgttacacaccatggaccagagcacacagatgtgcagaggtgtggatccagccctgccatgtgggatgtagcctcatgtctaggggtgggaaaagaaggggatccaaccaagggaagtcaacattaatagagaggaaaggtatcacatgttaatggtcctccatggatcaccctgcaaaatatctctgcaatccaacactgattcctccttctagaaattatcagcagacagtccagatagcattggccctaaattgtctcccggaacctcctgggatcaccatatctattcccaaggtttcaccactctgagagatgcattgtcctctctgctgttcacctcctagctgcatcttaggggcttctctggctgtgctgagcctcaaataacagaatcctgaggaccaccaggatcaagccagccttgcccatgtggatgagattctccactgtgtaatcctgggggtgtgaggttggggatggtgggcaaagagaccacagaggtcagggcagatcaacatcacccaggacctctggatgtccacccagggcacccacctccccttcacaggacctgaccctctgtgccagccccataactgaaagcatctcctcacgcaccagtcttggggtctgaattgttttgtgatgggctgagggtatcagctgctcctgagaatcaaagcaaaggagaagtaccctgagccagcctctcccatgggctcggcattcttatcttcccctgtctcctgacatgagttctaaggagttccttagtaaactcttcctctgtagcagtgttcgttccgttcttcttaatgaattatttcagctttcctgctttctacaaatccaaatgttgctcttgagtcatttgggggagagttttccttcaccctgagggctcaggatctgcaaggaaagtggtccccagtacagaggtcactgagccctgtgtgctgtctgtgcagcctgggacacgggagcacatgagccaattcccccggagatgagagtttcacggatccaccagctgaggacccaggctccctggatgaggggttggtcctcaggggctcccgaatgtcagaagcacaaagcggtgaaagtctggggctgcctccccttcacctgggttttcattgtccaattaatctaattaactaattcttcatataatcaggaaaacctagaatgatgtgataccttccccccggcccccatccaaaaatatctgtctgctaaatagtggtgctattagaggttcataaatcagtatttctgcttttacaaagtgtgaatctaggtgaatctagaccagtaacaaacatgtaaactcctaccacatcaaatgtcttatttatttatttattatttttattatttatttatttatttattgaggcagagtcttgctctgttgctcaggctggagtgcagtggtgtgatctcggctcactgcaagctccgtctcctgggttcaagcaattctcctgccccagcatcccgagtagctgggattacaggtgcacgccgccacgcccagctactttttttgtatctttagtagagatggcggtttcaccatgttggccaggctggtgtcgaactcctgacctcatgatcctcccacctcggcctcccaaagtgctgagattgtaggcatgagccactgtgcccggcctatttttatttttattgagatggagtctcactctgtcgcacaggttggagtgcagtggcactatctcggttcattgcaacctctgccgcccgggttcaagtgattcttgtgcttcagcctccctagtatctgggactacagggccgcaccaccatgcctggctaatttttttttgtatttttagtagagatgggcttttaccatgttggccaggctggtatcaaactcctgacctcaggtgatctgcccgccttggcctcccaaagtgctgggattacaggcatgagtcactgcgcctggccatcaaatatattaagaatatggatatatttatcaagtgaacttggaaatacttacacacatattcaaatgtaacttatataaccacacataaatatgtatagatgtaaaactttagatatttaagatgtagttacatacatattgatatttgaagtgagaaatattggcaagcaatatagaaataagtaaaatctccattgtctcatggtttgtatacatttcatcaggaaattagaggagatccatagaaaagcaattagaatggggtaatttggtagtgagttagcatgaaatacaatgaatatactcaaacgagtagctttctcatggataattatcttttatttttaaaatatgaaagaataaagtacttcacatatacattgttaaaggtgttgaataattcttcaagttggaatgaatataattcttcaaatgtccacccaggacacccagctcctcttgacaggacctgaccctctgtgcccagcgtcatcacggcaagcatctcctcactcaccagccttggagtcggacttgttttgtggtgggctgagggtctcagctgctcctgagaatcaaaacagaggagaagagacatattcagaggtaactcatatgacaaattattcaacacctttgacaacttataagtgaagtatttgattcctttatattttttaaacaagaggtaagtacccatgagaaagctactggtttgggtatattcattgtatttcatattaacttattaccaaattgccctcttctgatttaaatttaaattaacaattttaaagcatctctttttcctataaaagaggtttagttagatgtcagaattatccagtgattggacaacattggacatgaaccccccaggcccagagctgggctgcactgtagcccccgctgacctcccccgggtttcccatgccacagggagccgcccagtcagtttccctcgggccactgtgctttaaaacatccaaacacagccgggcgcggtggctcacgcctataatctcagcactttgggaggctgaggcgggcacatcacaaggtcaggagatcgagaccatcatggttaacacagtgaaaccctgtctctactaaaaatataaaaaattagccgggcgtggtggcgggcgcctgtagtcccagctactcgggaggctgaggcaggagaatggcgtgaacccgggagatggaggttgcagtgagccgagatcgcgccactgcactccagcctgggagacagagcgagactccgtctcaaaaaaaaaacaaaaaaaaagaaagacagcagattctaaaacagtggagatggaggttgcagtgaaccgagattgtcccattgcattccagcctggacaacactgtgagactccatctcaaaaaaaaaaaaaaagttttgagtggggtgtggaataggggaaggctctgcaacagatccaggtcctgcacaagctcttctgccacctgggccatatgatccagtggaacagatggtgcttgaagtgtcagtggcagatcgagatgctgtttggaggttttgacaagctccttcctataggtgaattggggcttagacacttaggattgtggagcaaaatcctatcatcattcacagatagctagtctccttttgaaaaacatatatttttttttgccgggcacagtggctcatgcctgtaatcccagcactttgggagaccaaggtgggcagatcacctgaggtcaggagttcgagaccagcccggccaacatggtgaaaccctgtctccactaaaaataaaaaaattagccgggcatggtggcacctgcctgtaatcccagctacttgggaggctgaggcaggagagtcgcttgaacccaggaggcggagattgcagtgagccgagatcatgccactgcactctagcctgtgcaagaagggtgagactccatctcaaaaaaaaaaaaaaaaggaaaatattatatttttttccattattgagccttaggagagactggatgcttgggcacaggtcaccaaggtaccatgaaatgtgaagtgtgtgttagccgatgcaagctgtataataagatcatgtccactcaggccctgaaagtgtgagcaatttacacaaagcagggggccaaatgcccatggttcctgtccctgctacacaaccttctgccttccagcctgcacctataatctcatggggatttctctatgctccgttgacagagaaagtgaagactcaagcctggtttgcagatggttctgcacgatatgcagacgccacccagaggttgagagcttcagcacttctgcccctttatgggacatccctaaaagacagtaaagtcagggcgcaagtgacccccttcctgaggacagagcctgcggctgggcgccttgagtgtcctctcacctgtcaccaccagcaccaggggggtcactgtgccctgaccggcctgtggcactttgataataacagtgacagttctctgcattgtgctctggcttgtgtgagatatgggtcctggtcttgttcccaggccccagtggtttccttaatgttctgtgacactgagcttccctctttatccagctggtgctcttggggctccagggtaccctgacaccaggtggtcacaggcctcctcccagggatcacacagtctggctcagtccaggtggtgggtttagtgaggagccttgaaatgaaatcacaggttgggtcccaagatactaatgcattcctcaaatcccagctgtcagtcccaagacccgcccagatgtccccatcagtcagctcagagatgctgttctccatccccaggtggctgggggtggcccgttgtccccagtgagcaggagcgacctgggactgctggggacagactcacctgcctgcacatgggtcctgaagctcagactcagccctggaagagagttccctgtgagagatttgcccctgaagcctgagcaggtcctcccctgcctgggagcatcctgacccctgagatttcctgatagaccagggcttggctgtggagtgaagtcccttcaagactagggtgccccttctcctcttgaaatctcaccaagtcagagtagggttgtgagggtgggagtcacggcatctcctcccactggccccagctgtacagatggatgaaaccatggtgtccaggaggacagacagacacactcaaaggctgggttctccctgtcatggggttgtcccatcagcagccccacaggaaggggaactgcagaagcctggctctcatttccccagggctgaggtgggagtgagcaccaggtttcctgaagacatttcagacagaaatgggctccccctgatccttggctactggctgcaggatctttcctcatcttattgagggctaggatgtagtagaaaaatgggcccagggcctccctgagtgagcctcttccaggtgagggtaactgagggcttctcttcccctctcagagcctccacatggggtctcctttactccttcatcctgtctatcagcacggggttgtggggtccttaccatggccagtcatctcatccgtcgtggagatgcttcagggaaaatgcaggtccatggtgcagggcagactcaggtcagcagagacgcatctgacatcaggctgtgtagttcaagttgagctgcactgtggcaatgagcgcaatggagaaacacaggaaatatgggtagagaacacgacctgtatccaacactgccagtttgctctatcaacccgtgccctccatggactttccctttctcttagcagcagtatccaccttcgtctccttggaaacagacttgtgatccactcctgagtcttcagtgtcctttgtttccctgaggggaactcacctgttgggatggggagctgatttttacttaatgattgctcattatctgctgcccatgtgaccttgagccttcacaaccccttctctgagcctcagtttccttgtgtggagcaagttgttacacaccccactcatcagaggggtcgtgggggtcggcggtgactgggacttcgaaggagctcaatgatggttaattcccaggacagagtaagacatagggttgtaaatttgagaaaatcagggtgttggacaattgacgctcccacccaagaatcctcatctaccctgagcactaagaaattgtacatataatattgcttaaatacacagattatcacagtcatgagtagaaatccttccttccttcttccttccttccttccttccttccttccttccttccttccttccttcttccttccttccttccttccttccttccttccttccttccttccttcctccctccctccctccctccctcactccccccccctttctttctttctttctttctttcttctttccttttttttttttttttgacagagtctcactctgttgcccaggctggagtgcagtggcacaatcttggctcactgcaaccaccatctcctgggttcaagtgattctcctgcctcagcttcctgagtagctgggactacaggggcatgccaccgcacctggctaatttcttttgtattttagtagagatggggtttctccatgttgcccaggttggtcttgaactcctgagctcaggcaatccgcccgcctcgccctcccaaagtgctaggattacaggcgtgagcaaccacgcccagtcgaaggactagtttttaattccggttctggctgtctggttggttttggttttcctcatgtatgtttgctgagaggatctatgtagttgcctgtgatgcccgttaatccaaaattgccacctcactttcatcagtaggtggtatcttaggccatcgttatataagagtaacttttttttcactttttggaaaatattttatttgccaaaatacatttgagaaaaataatgttgattatacaagcggataaagcaattgtcatatatatatacacacatacacacacacatatatacatctatacatatacacatatatatacatatacacacatatatacgcatatatacatatatacacacacatatatacatatatatatgtatacacgcacacacacaaatatatatacactgtggaatactactcagccataagagggaacaaaataatggcattcatagtgacctggatgaaattggagactattattctaagtgaagaaattcaggaatgaaaaaccaaatattttatgttctcattcctaagtgggagctaagctatgaggatgcaaaggcataagaatgctacaatggactttggggactcgggggaaagggagggaggaggtgagggataaaagactataaatcgggtttaatgtatactactagggtgatgggtgcacaaaaatctcagaaatcatcactaaagaacttctgcaagtaaccaaacaccacgttccccaaaaacctatggaaataagaaagaaaataaaagaaaaatgatgttggttataagttgtgcaaacctgtgtcttaacttgttcattccaccagcataaaatgcagcaacacatgtgcagtgttggccccaggcaaatctgcttgagactcaatgttcaagattgttattaggtggggaccacataggcataatgagcagctacagagaaaccagaggaaaccgggtgttcgccatgaattacactgtttacagaaacagcctagtgaagacataacagcagaattcagtgccgcaggcacacaacctcacgttgtctcttagtaacacaggggacatgctagaagcaagttcctagatgccaaccaagaatcaagctcacaaacaagtccttctaaagttagcatcctcatcactgttaggttaacttcttcttgcatatccttcacctaaaagaaatagtagtcatcttcaatccttcagcacagcgttcacacagcacgtgcctccagctctcccagattcttctagggccagcacagcttttctgatgcagatttttcaaagttctccaaactgaagagtcaatccaaaatcatcttgactttccatgttggcggcctttgggggccttctctggctgtgctgagcctgaaagatcatcccctagagaccgccaggatcaagccagcatggtcattggaatgagattctccattgcatagtctgaaggggcatggtcagtagacagaacagggcattcactgggggctagacaggctgcacccacattgggagcctggatgggtgtttacacattcacactcctgaaagagaagtcgtagttactcctgactttgaaactatacttggtggatgctggttgagaggatcaaggactcctacgaataagagcatgggaggattagagcagctggggccattctactcctgctcccctgtcttggctccttcataacaactctcttccctcttttttttttttttttttttttttttttgagatggagtcttgctccattgcccaggctggagtgcagtggtgcaatctcagctcactgcaacatctgcctcccaggttcaagcaattcttctgtctcagcctccagagtagttgggactacaggggcctgccaccatgcctggctaatttttgtatttttagtagagacagtgtttcaccttgttggtcaagctggtctcgaactcctgacctcagatgatccacctgccttggactcccaaagtgctggggccaccgcgcctggacctctcttcccttctcatgggagaattgtgtaaccatccttgctaacctcaactcccacctcagatggagcactgtatgatttccttcctcaaatttgttcaagttcttgggcctcattgaggtcaccaccaacctctcggtttgggggatattaagagtttagttttgcaaccacaactcagtgacagaaaaaaggaattcaaagatacaggaatacttaactgtgctcctttctcatcttcaatttgttcccatattaggtaaacccgtgcttaaccccttaaggtaaatacctctagtaactcttcatctgtcaatacagaattcagagatgcgtatgtgggactctagattgtaccagagtccagggtacaacagagctaaaggctgtcactgccttttctattgttctgcctcatctaattatctctgtggtccagtgtagcttaatactactactattaaaagtaataatcactgcctcacttttaatgattgggtccactcatctgtcctgttttgcgatgaatgagagaatgattttagaatccaagccttttttttttttttgagacagagttttgctcttgttgtccaggctggagtgcaatggtgcaatctcggctcaccgcaacctctgcctccgattcaagcgattctcctccctcagcctcctgagtagctgggattacaggcatgcacaactacacctggctaatactgtatttttagtagagacagtgtttctctatgttggtcaggctggtctcgaactcttgacctcaggtgatccacccacctcggcctcccaaagtgctaggattacaggtgtgagccaccatgccgggccgcatccaagcctcttttccaggagcaagaaatactacagtgaaaaaaatctcccattgttaattcaatgtagaaactcatgagaaaaaagcaaaaaattttaaggagataaattagaaaacaacatgtgcagatggatacatggacaaaaaaattaagctacctagagatctcgaatgtgtgtcaacctaatacaaggactattagagaatacaggtgggcaagaatcacttaacccactttgtcatggaaaatgtctttgaggatgtgacaggtttggaaaaatgaaaaaatgacaaagtggtcattatatgaagatccagaaaaataatattattcaatataggatcagctgattgaagtattcaacaaatatgcagaaagtttcctagtgtggacaagacttatttgattatgaggaaatttaataagtgctgtgaagtaacatagatctgtattcacagatgtgcaataaattaagtaaaaatcaataaagacataaaatgagaaaaaaacctatctacaataaaaccatcaatctcaaatcattggatggagagaaatatacatatacagaatactctctgagaataactagaataaggagatatgtggccgggtgcagtggctcacacctgtaatcccagcactttgggaggtcg[133 bp omitted]gaggcaggagaatcgcttgagcctgggaggcggaggttgcagtgagcagagatcacgccactgtacaggaagtttcaaacccaggagaggttatctttcaagtactcagtgttgtggtttctcctgccagggtgacaacctgatgattatggaaatctaatcagaaaactgctatcttgcttttattcctacctccacaggatgaaaacagttaatggtagagacaaaatatgtccagagtagacaggagtcacagaaaaagtgaattctgatacgttctttcccaggaagttactggtacagaagtttagaactgagataccttttggaaacaaggatggcattctgcctttgatggatggaagagtactatcccagatttagatagagtttgctaaaggcgtctatcttagagtggctgagccatctccacttcaagctatgactttctgtgaattacccacccacttgtccttcacaataagagcttacccacccacttgtcctacagaataagagggaccttttagtctgctcttctgattgcggacctgattccacaggtgcctggggcatctttgcaatccctaggaatcagcaccatggacaggggcaaggaatagggtccactcctctctccacttcagctggacctcttgttcgttttctttctttctttctttctttctttctttctttctttctttctttctttctttctttctttctttcttttctctctttctctctttttctttcttttctctctctcctcttcttttctttctttctttctttctctttctttctctccttcttcccttctttctttctttctttctttctttctcttccttccttccaacttttatttcagacacagggagtacaagtacaaatttcttacatgggaatattgcttgatgctgaggtttggagtacggatcacatcccccaactagtgagcataatacccaataagtagtttttaaccctcttccaccctctagtaatccacagtgtctatttttcctatccttatgctcatctttttctttacacatttcacctcatactgaccacccagcaggaacaaaatacctcaatgctgcttggaaaataaggctccctcccttcatctctacctttcttcccaggctctctggaaacaacctcttctgtaaagacttcaagggcagaagaataagctgagaaactcagcccagagctgccggagactgtgactcctgtagtctgtgaggaccttgttgctcagccaacatgaagtgagtccatgagggtgaggagctgcagatcccacagactgtttggggcagggacagaaggagtaggtggggttgtggtgcctcttgctctgttcctcagcttcatctcttttgctcaaaggttggccccctaccttttcaaatcttctcattccactcacccagcaccttctgtgacccccgagtagggtaaggcatggagagtgagaatgacccccactttcatgaatttcttcatccctttctgagatgggattgccctatgactggtccctgctgtttttccttccttctatcccaggccggggctctcctagcacagggatgcatgctaaggtttagaatcttaacggatgtggtgcttggagctcctgtactgagaccaaaatctttaggggtcactggggtgtgacaataggggtaaggaggaactatgtggaccacagcactagtaggtccccctgtgggctgaagtcagagggcttggagtaaacttggcctgagagagtaaggccatgtctttcaatcgatggttttggggaggcacaagtgaccggtccttggacagacagaaggtacccaaccagatctctgagtagcactgcaaggtcaagttctctcccgaggacactaagggccctggctcagacaaatggagggtttcttgtacatttctaggaaatatgaaggttgcagtgtgtacaaagcagccccttcccacatgtcctggaccccgaactgagggactggcctcctctctctcagctcctgttagactcttggtgtgggtctttgtaatctccaggcctctcactctccttttctaagttgctctccttggaccactgcctcatcgcatcctctactctaggaccctctccctggaccctcaacccagggatgaccctggtcccaggac[131 bp omitted]aaacccagtcactacaggccaggtgcggtggctcacacctttaatcccagcactttgggaggctgtggcgggcagatcacgaggtcaggagatcgagactatcctggccaacatggtgaaaccctgtcactactaaaaatacaaaaattagcttggcatggtggcatgcgcctgtagtcccagctacttgggaggctgaggaagaagaattgcttgaactcgggaggtggaggttgcagtgagccgacatagtgccactacactccagcctgggtgacaaagcgagactccgtctcaaaaaaaaaaaaagagcgaatggggcttgaaggctacagacaagaggttaggacgccattttggatttatcttttcctggagggcatctgatcttctcccatggatttagttactggttcaggtgtggaactctgaactgaagagatggaggctcagtaaagcacacagggagtgtgataatgagaattgaagtggactgtgtgacacgccaaggaccagagcatgcaggtgtgcagagatgtggacccaacgctgcctgccatgtgggatgtagcctcatgtctcgggctgggaagagaagggaatccaaccaagggaagtcaacattaatagaaaggaaaggtgtcacattttaatggtcctccatggatcaccccagaccagtgtctctgcactcaaacacccattcctccctctagaaattgccagaggctgaggcaggagaatcacttgaacccgagaggcggaggttgcagtgagcccagattgcgccactgcattccagcctggtgacagagcaagactccatctcaaaaaaaaaaaaaaaaaaaaaaaagaaagaaaagaaaagaaagaaaaaaagaaattgccagcagacagtccagatggcataggcctcagatggtcttcccgaacctcctaggaccatcagattcgcttccaaggctccagcattcaatggtgcattgttctctcttctgttcaccttccagctgcagcttgggggcttctctggctgtgccaatcctgaaatatcagaatcccaaggaccaccaggatcaagccggccatgcccatgcggatgagattctctactgcgtaatcctgaaggtgtgaggctggggatggtggacaaagaggtcacagaggtcagggcagatcagtatcacccaggacccctggatgtctccccagggcacccatatcatcttgacaggacctgaccctctgtgccagttccataactgagagcatctcctcactcaccagtcccagagtcagacttgttttgtgacggactgaggttatcagctgctcctgaaaatcaaaacaggggaaggggaaggagaagttcttgaagcaatctgagcccagcctctcccctgagctctgcattctcctagttccctgtgcctctcaacatgacttttatggagttcctccataaaccctccctctgctggagcagggttccctccagtctcctcactgaattatttcagctttcctttgttctttgaatttaaactttgctcctgagtcatttgggaaagagctttcctgcaccgtgaaagctcaggatctgcaaggaaagtggcccccagaagtcactgagccctttgtgctctctgtgcagcctgggacacaggagcacataagccaattcccccagagatgagagtttcacggatccaccagctgaggacccaggctccatggatgacgggttggtcctcaggggctcctgaaagtcagaatcacaaacagctgcctccccttgacgccacctcaaccacctcacctggtgtttcatcatacaataagtctctagtcagctaactattcatatagtcagtcatatatatatacgtatgtatataaatgtgtgtgtgtgtgtgtgtgtgtatatatatgtatatataaatatatatatatatatatatatatatatatatatatatatatatatatatatatggtgttacagaggctcataaaacaatttctgcttttagggccaggcgtggtggctcatgcctgtaatcccagcactttgggaggccaaggcgggcagatcacgaggttaggagttcgagaccagcctggccaacatggtgaaaccccgtctctactaaaaataaaaaaatgagccgggcatggtggcacctgcctgtaatcccagctacttgggaggctgagacaggagaatcacttgaacctgggaggcagaggttgcagtgagcccaggtcatgccattgcactccagcttgggcaacagggcaagagactccatctcaaacaaacaaacaaaaatttctgcttttataaagtgtgagtctaggtgagaagaccaataacaaacatgtaaaagccctccatgtcaaatacattaagcatgtagatatacgtataaaaaatatatgcagatatacctacacttatattcagatgtaacttatataaccatacataaatatgtatatatgtaaaactttagatatttatttaagatgcagttacatgcatattaatacttgaagtgacaaaaattgatatgcggtttagaaataaaaaataaaatttcaattttcttatagttaatataaattttatcagtaaatttggggagatcagttgaaagataattgaaagggaaaaatgttatagcaagctaaaatgaaattaaatgaatatactcaaactaaaagct[185 bp omitted]ggtggtgggtgcctgtagtcccagctactcgggaggctgaggcaggacaatggcgtgaacccaggaggcggagcttgcagtgagccgagatcgcgccactgcactccaggctgggcgacagagcaagactccatctcaaaaacaaaaacaaacaaacaaacaaaagaaatatacatgaatcaaatacttcacttaagaataaagtagttgaagaattttttaaattagactaaatgtacacattcttatgaacggaacttgaaaacacttattaacttcattaataaacttcaattttatatattaataatagaaatacttgctattaacaactaattttatacagcaaatgtaaatattgaattatgcccccaggacaatgggagtggaattacttgtttttaaatcataaatccatatatcttaaagagacaaatttaaatattcaaatattgttttaaaagattcagaagaagagagaaaaaataaacaagtatgcccagaaaatgcagagcagcaatgaacagcagacaagacgtgctgtgaataagttcctaacttcctccagggagcaggtgcgcggcccctcctttgtctcaggggtgccctgagcacagaggcctccaggtgagcacaggaggggcggtgtgagtggtacccacagctggggcgcttctctctaaaggagcaggtctggcgtggactccagcctcatcaccgtcagatcccaccgaggcctgagcagcctcctcccctgtcctgagtgggctcagggaccccgcaggtgtgggtgaggggctccatcctcaggggctcttggaaatgagaagtgagagctgccaagggagcgtccgtctgtcctctctccaactcgcctgcctctcttcctcctccatcagccccagcatcttccccatgttccaagtcaggcctggaccccaaatcctgctgaccaggtctgttctccttcctctactcatcactcatcccgcaggatagggtaggggcctgggagtcttgtaaagctgcatggtttttagtagaaaatctgaaacgcttcgtgtgacatgtgagagagaggagattctaaacagtggggtttttacacatctttgctttctcataatattgtggcttcgtctcacgaacctcagaccccagcactgatggatatgattacatgtacctgcagctgcccctcttggctttctaacccttgcgaggcatagctattggcaagagcagaccaggtcttagggtgagtgatgggagctgcttttctaggtctaggatgagccacatctcagatgccccacaaggtcagaaatgagggggctttgggggtcacttccaagctcagggggaagtcagcctgggagagcccagcctggggctgccggccagtggaggaggtcacgtctgtcctccttgtagagagcaaacctgtcatagccaacatcagagtgatactggagggtcaggttctctccagggaccacaacagggccctgcggggtcaggagggagggctttctagacacacctggaaggataaaggagccgggactgcaggggctggtt[136 bp omitted]tcccgggttcgagcgattctcctgcctcagcctcccaagtagctgggattacaggtgtgtgccgccacgcccagctaatttttgtatttttagtagaaatggggtttcaccatgttggccaggctggtcttgaactcctgacatcaggtgatccacctgcctcggcctcccaaagtgctgagattacacgtgtgagccactgtgcccagcccttgctttgttttcctcaccctgaatttgtgtccctaggatttctgtgttctccttcccctttttgtctttcttagcaggggctgccctgcctgtaaagctctccacaacctgtctggcttccctgaattgtactagagaagactgtggcttcctcacctgagaccggaatctccaggaggtcactgggttctgaccatacctgcaggatatgcctgcgagagccatagcatctgagcatccacctgtggctgggggtcacagggcccacagggaacagggcctggaactgcccactgggggtcagctgtgagtccaaggtccaggagagcttgtggtctccttcctcagtcagaatgaacctgtcgaatctcagccgtgagccacactggagggtcacgttctctcctgaggtcaccacaggactgggcagggctgagagggtgggtttgttgtagaatcctaggagagaaggaggcaccgtgttaaatggggctcccacctcccacatcatccccagggctgggctgtgaaagggagacacccctgagagccgacccccttcctgagggcagagcctggagctgggaccccagagtgtcctctcacctgtcaccaccagctccagggggtcgctgggctctgaccagcctgcagggctgtagtagtaacagcggtatctccctgcatggtgctctgtcatggatgggatggagaatctggccttgttcttgggctccagtgggttctgtgtgtcccagggttctgggcttccctctttaaccagacggtattcctgggcctccagggtcccctgacaccggatggtcacagagttcccccggctgatcacagagcctggctcagcccagagggtggctttggagaggttccctggaaggaaatcagagtctgggctccaagacctccccacccctcagatcccagctctcagccccaggaccctccagacgtccccatcaatcacccagaactgcggtcttcacccccagctgcccatgggtggccctttgtccccattgaggaggagggacctgggacagctggggacagactcacctgcctgcacgtgggtcctggggcccagactcagccctggaagagagttccctgtgagagatttgcctctgaagcctgagcaggtcctcccctgcctgggaacctcctaaaaccctggagtttcctgatagacaagggcctcgttatggggtggggtccctcccagactagggtgccccttccctgaggcttccaatctcaccgaggcagagcagaaccatgagggcagggctcacggcgtctcctcccactggctgcagctgtgcagatggatgagaccatggtgcctggcaggacagagagacacacagggtgtggcagctcggaggctgggtccttcttgtcataggattttctcattctcagcccacagaaaggggaactgctctccccaggagcctggctctcatttccccagggctgaagtgaagtagttgagactacaggcaccaggctctctgcagacatttcagacagaagtggggtctcccttccccgggccactgtctgcctgatttatctttatctcactgagagccgggacacagcagcaaatagacccggtgccttcctgagtcagcccctttcaggcgagggtgacctcctccctctcagagcctccccatggggtctccctccctccttcagcccgtccatgagctcagcgttgcggggtccttaccatggtcagtgatttttcagccctggagatgcttcagggaagatgcaggtccatgccacaggcagactcagatcagcagagacacatctgacacctggctgtgtagcccaggctgagctgcatgtggcaatgagcacagaggagaaatgcagggaaataggggaggaaatcatgaccctttagtggccctggagtgttttctttctaaccaatagtactctctttcttgtacttcccttaattttttttttttttttttttttttgcaacagcgtccacctccaccccacctccagtaacaaacctctgaatcttttctgcctccactgtgccttctgtttctttgggcttccctctatacctcaatccatgttcaacattttcggagtaattacttaggctttgttttaaaattttcattcttatgtatctatttattttttaatttttgtgggtacattacttaggtttgggctctggtttgctgagtgggga[132 bp omitted]tctcctgcctcagcctcccgagtagctgggactacaggcgtccgccacc[184 bp omitted]tacggcttgtgtgatcttgggcagtactgtctcatctctgagcctcagtttccctgtgtggagcctgttgtcatgaacctcactcatcacagcggatgtgggggtcagccgtgcttgggtcatgggagaggctcaatcacggttaatgtctagactagattaagacatgaggggttgggacatgagaggattctggtttcagtctctatgattatgtcacagaggtgcagaaaaagcatttgataaaatcctgcatcccttcatgataaaaattcccaacaaacaaggtacagagggacatacctcaaaatactaaaggcgataggtgacgaaatcccagccaatatcgcaaacagggaaaaatagaaagcattccccctaagaactggagcatgacaaagatgtgcactgtcaccactcttcaacgtagtactggaggtccttgccagagcaatcaggcaagacaaagaaataaaacacatctaaattggaaaaaaaaaaagtgaaattatttctgttcgctgatgatattatcttatacctcaaaaaccctaaagactcagccaaaacactcttagatttgataaagaaatgcagtaaagtttcaggatatagaatcaaagtacagaaatcagtagcatttctgtactccaataatgacgaagctgagaaccaagtcaaggaggcaatcccatggacagtgggtgcacaaaaataaaacacctgggaatatatttaaccaaggaggtgaaagatttctacaaggaaaacttcaaaccagtgatgaaagaaattgtagaagacacaaacagatggaaaaacatcccattctcataaatcagaataattactatgattaaaatgaccacattgcccaaagcaatctacagatttaatgcagtccttacaaaaataccttcatttttcacagacttagaaaaagaaaccttaaaagttatattgagccaaaaaaagagcccaaacagccatagcaatcctaagcaaaaagagcaaagctagagacatcacattaactgactcaaagtttacaaggctatagtaaccaaaagagcatgacactggtataaaaatagacatataggccagttgcagtggctcacgcctctaatcccagcactttgggaggctgaggcaggtggattacgaggtcaggagttcaagaccagcttggccaacatggtgaaaccccgtctctgctaaaaatacaaaagaattagccaggtgtggtgatgggtgatctcaaattaacaacctaacatcacaactaaaagaactagagaataatccgcccggcgcggtggctcacgcctgtaattccagcactttgggaggctgaggcgggtggatcacaaggtcaggagatcgag[135 bp omitted]gcttgcagtgagccgagatcacgccactgcactccagcctgggagacagcaattggaatgcaatttagaaataaagtgaaatttcaacttttgtgtgagttatgtacattttattagtaaattagaggggatcaattgaaaataattggaattaagaaattctgtagtaagttggtataaaataaagtaaatgaactcaaaccaattactgtatcatgtatacctagcttttatttataaggaatcaaagacctcatttacagattattcaagtgattgaataattgtttaaattgaaataaatatataaaattcttataaataaaatttcaagacacttcttaagttcatcaataaacctcaattttaaaagtttaggataggaaaacttaacataaataagaaactattttctaaagcaaatatataaatgaaatcatgtcccaaattaaaatgataagtttatatattcatgtattgctttaaatgtttcagaagaacagagagtaacaatagacaagtgtgcacagaaaaggcagggtagaaatgaatgacacacaagccgcgctgtgaataactccctaactcatccagggagcaggtgcgtggcccctccttactctcaggggttccctgagcacagaggccttcaggtgagcacaggaggggcggtgtgaggtgcacccacaagtggggtgcttctctctaaaggagcaggtctggggcggaccccagcctcatcccagtcagatcccaccgaggcccgagcagcctcctgtcctgtcataagaggacccagggaccccgcatgtgtgggtgaggggcttcatcctcaggggctcttggaaatgagaaataagagctcccaagggagcgtccatctgtcctctctccaacttgcttgcctctcttcctcctccatcagccccagcgtcttccccatgtctgagtctggctggaccccaaatcctcctgatccagcctgctctccttcctctgctcatcacatatcctgcaggacagggtaggggcctgggagtcatgcacagctgtgctgggtgttgcttttagtagaaaatctgaaacagtgtgtgatgtgtgagagaggggagattctaaacagtggggtttttacaaatctttgctttctcctaatactgtggcttcatctcacgaatctcagaccccaacattgatggatacaattacaattacatgtacctgcagctgcctctcctggctttctaacccttgcaacacacagttattggtaggagctgaccaggccaagggagggctgggggacggcagcaggtctaggatgagccgcaacccagatgccccagaaggtcagaaatgaaagggctttgggggtcacttccaggcagctccttcttattcggatgggaaaggccagggcggaaggggaaaaggctttctcagaagttctgaggtaggatgtgggactttggaggcggggactcagacaccacaccagattgagaactagctaaaacagggcagagggtggaagcagctcttcttaagacacgcccaccagtgtggcatcccggtttaccgttgccatggcaacccccggaaggtaccgcccttttccacggcaaagacccactgaccggaagttaccgccctttttctaggaatttctgcatacctgacctttaatttgcatataattaaaagcaggtacaagagtggctgcaggtgtgtttctgagctgctattctgggcacaccgcctgtggggcagccctgccaccctaggagcagtacctctgctgctgctgtgctcggccacttgactagaggttgccgtaacccttaaggggttgtgtaacaccagctcacccttaaattccttttttttttgtttttgagatagagttttactctgtcacccaggttgaagtgcaatggcgccatctcggctcgctgcaatctctgcctccggagttcaagcgattctcctgcctcggttccgaagtagctggaattacaggcaccagccaccacaccctgctaatttttgtagtctttagtagagacggggtttcaccgtgttggccaggttggtctcagactcctgacctcaaatgatctgcccgcctcagccttccaaggtgctgggatgacaggtgtggaccaccgcgaccggcctaaattctttcttaggcaaagccaagaactcttctgggctatgccccgatttgggagctccccttccccgcatcatctagttaccaggaagggatgacggagacagcgagtgagaggcagagagactttccgcagaggcagggacaattaggagagaggcgagatggctagacagcagagatggtgacagtgatcagcggaggggtggcaatgggtgaaagacacggagaggtggcactgggctagacagcgagaggttgctgagacagtcggagagacagcggggcggggcagtctgtgatcagggctccaagagcggtcacacaggctgtaacagtaaacagctgctaatactgcagagctgtcacactaaccaaaggctttgcttttggcgccttcatctttccttggatagtggtggagctcagcgatgggcaagcaggtgagacccccgctccaaccgacaggcccatgggttaccagtccccgcaccggacccctgggtgacagctgagcccacccaagctgggggatcctgcagagaccttcacctgggccccatgtggaagatttttgatgttatttaggcttttggggatgggggagtgtcccctctgcctcccccgtaatatctggtgagccgtatgggtaatgcgagcactagacacctaaaccccaccagaacgcaatgcatccatgtaaggaacctgcgcgtgtagcgcctgaatctaaaaaaatagagtaacattaaaaacaacaacaacaataaagccgtgtgaggtggctcacgcctgtaatctcagaactttgggaggccgaagcgggtggatcacctgaggtcaggagtttgagaccagcctggccaacatggtgaaacaccgtctctactgaaaatacaaaaacttagctgggcatggtggtgggtgcctgtaatcccagctactcatgaattatcatgaagagaaaatgggccaggtgcggtgactcacgcctgtaatcctagcactttgtgaggccaaggcggacagatcacctgcggtcaggagttcgagacaagcctggccaacatggtgaaaccccatctctattaaaaattaaaaattagccgggcatgatggtgggcacctgtaatcccagctactggggagtctgaggcaggagaatcacttgaacccaggaggtgaaggttgcagtgagccgagatggtgccactgcattccagcctaggcgacagagagaagcttcgtctcaaaaaaaaaaaaaagagaaaaaatggtccacaataaaataacaggcggttattgtacctgaatttatcagtaaaaaattgaattttttcttttattgcctagagtccaccttctatcaatgtcacaagcatgacactcagaacagagaggaaaagattatatttgaagtcctaatataaatttaatttaccatattgaagtataagtattttagagttgcttcatgaattttttgctaaaatctaaaaagaaaacccacaaaaaaccctaaatgtaatgacgttaatgcagttcctgacagtgacttttagcccttctgcaaacttttgtttcgttgccttcctgaccgtatgacgcaatgaaatttcgatttgctttaatttctgcttcctctttccctatgtttcagttctgaaggtatgagcttctctcatctttttcttttcttttactttgagatggagtctcgctctgtcacccaggctggagtgcaacagcctgacctcagctcactgcaacctctgctacccatgttcaagtgattctcctgtctcagtctcccaagtagctggatgacaggcatgagccaccacgcccagttaatttttgtatttttagtagagacaggatttcaccctgttggtcaggctggtctcgaattcctcacctcaggtgatccacctgctttggcctcccaaagtgctgggattacaggtgtgagccaccgtgcccggccaggatatttttttctttagagcacttacttcactttctttgagtgaagttggatgggttacagccgttgtggtgttacaaagaataattctgagagaaatattgttatttgttggtaaaataaaagtgtcttaagttaaaagtttcctttgagacccaataaagaaattagtattactacataatgcatttatttacaagtctttttttgcatgtccattgtaaatttaatattttaatttacaatgagtttacaaataatttttacaaataaatgttacaaataaaaataatttacaatgagtaaatgagttggaatttatttacatgcttatggctgcctttgattaaacttcttccaaaaataaactctgtccagatgttgggttttattatacttaatttcattttaatgttatttcatgtgagattacttgaatacaagctgttgcataattgctcccaagtggagtctttgctgtgcacttgcataccccagagtgggaggtttggggattctgaatggccagggcagcgtgtgggtgtaccttcacaggcctgatgtgtgagccttcaaacaccggggtggaggaagtgattaaatagaggatgcaatggtctggaggcaatttatagcccagagaccatacctggggcatttctcttccttatctagcacacaaagtagaaccgtgacactcgggcgtcactgacaatgaacacaaaggggctgaatgtcgggaatcctgcagacgccaggaaagaggtacttctcagccattggcttggattctgaatctgggttacgcacaatgacaaaatatcagctagagcatgagaggagacaaacatgctcaccaggatgaggatggtgtgtgtggttgtggtttcatgagatgttctgcgggagaggttgcggctgcgaacatgttggactctctgcttgtatctatgcaggacgaggaccatggagctgctggtgcagatcatgagggagacacatatacgggagacacatataccatctgtgcagcagtaaatgactgcaactattacatacagcgatcttcctggatagggtgaggagcagtatctatacattttttccatactcatgtttttgctctttattgggtcagttatttactttgcagtataaatatttacaacaagattcaagatccaacagaggaaacagcagaaaactataaactttggggatctaattcagagttccatcttcccagagatactggggtgaagcttcatggcctggaagccactgaagaggcaggtggtgctgagggaaacccctctggccactctgtgtaggtagaagacaagtttacatccagcctcatccaggaaaggtttcaatccaaaagccgccactgtctgagggatccctttagagaaaagaaccgggttgttggctaagaccagctggctgagaatcaggtctctgggtctcactatttgtgtggggacaaaagtaaagctataaaagtaaaggagtagagaatttccaaggattccagcagcggtctgaatgagaaaggtaatactccaatttaagttaacagaaaccatctccatttagaggagatgttggagtttgattctattttcatcagaggaatctgtagactgaaaaatacaattgagtgttttcactgtacccggtttcatgcgcttccgtgtgaagagaccactaaacaggctttgtgtgagcagtaaagcttttaatcacctgggtgcaggtgggctgagtccaaaaagagagtcatcgaagggagataggggtggggccattttataggatttgggtaggtaaaggaaaaagaggggttgttctctggtgggcaggtgtgggggtcacaaggtgctccgtagaggagcttttgagccaggatgagccaggagaaggaatttcacaagataatgtcatcagttaaggcaggaacaagccattttcacttcttttgtggtggaatgtcatcagttaaggcaggaaccagccatctggatgtgtatgtgcaggtcacaggggatatgatggcttagcttgggctcagaggcctgacacccagaaaatgcctttttctcacgaaactcattattccaggtgaatacaaacattaagaacaaacttgtacaattacaaagctatttattccaaaattatgatttgtaaaactacaatgacttgaacccacttaatttcaatcaaagaaagactcaataaattcctgggcctccccacagtggagtcctgggcagctgtgggtgagatgaatgagttatcttgaaggctgaccttccaagacgtgtagttgtgtagttggggtggcagggagaaaagaaaaagaaagattcaggacgttatcaacagttaactttattttactcagaaccagagaaaaatggtatagtgttatgtcattgtgtgtgtattttgtaatctattttttaaaatgaaagattaatcaatacctttaaaagtgggtagttgagagagagagagaaaacagtgcagaggagacagaataaagctagactgacatcattgtgtcttgtttcttgttttggtatagaaatataaacatacctttgggaggctgaggtgggcgaatcgcaagatcaggagttcaagaccagcctggccaacatggtgaaaccccacctctactgaaaataaaaagattagctgggcatggtggcacactcctgtcatcccagctactcgggaggctctgacaggagaattgcttgaacctgggaggtggagattgcagtgagctgagactgtgccactgcatttgtagggaccagccccacagggtcggtgggtctctccctgtgtgtggtgacgatagagtgtagaaataaagacacaagacaaagagataaaagaaaaggcagctgcgcccgggggaccactaccaccaatgcgcggagaccggtagtggccccgaatgttgggctgcgctgttatttattggatacaaggcagaaggggcagggtaaagagtgtgagtcacctccaatgataggtaaggtcacgtgggtcacgtgtccactggacagggggcccttccctgcctggcagccgaggcagagagggagaggagacagagagaaagacagcttacgccattatttctgcatatcagggactattagtactttcactaatttactactgctatctagaaggcagagccaggtgtacaggatggaacatgaaggcggactaggagcgtgaccaccgaagcacagcatcacagggagacggttaggcctccggataactgcgggcgagcctgactgatgtcaggccctccacaagaggtggaggagcagagtcttctctaaactcccccggggaaagggagactcccttccccagtctgctaagtagcgggtgttgttccttgccacttacgctaccgctagaccacggtccgcttggcaacggacgtcttcccagacgctggcgtcaccgctagaccaaggagccctctggtggccctgtccgggcatgacagagggctcgcactcttgtcttctggtcacttctcactgtgtcccctcagctcctatctctgtatggcctggcttttcctaggttatgattacagagggaggattattataatattgggataaagggtaactgctacaaacaaatgattaatgatattcatatataatcataactaagatctatatctggtataactattcttgttttatattttattatactggaacagctcgtgtcctctgtctcttgcctcggcacctgggtggcttgccacccacagcattctagcctgggcgacgagcaagactccgtttaaaaatatatatatatacatatataaacatattcctgaatgtctatactataaaatatttttaaatataacttataaatctaaagataataccttaaaaaaggaaatagaattgagttcctatcaaattagggcattactaaacaaggaagaattatttgtactagaatgtaagcaaaattacttgaccatatattttataatgcatatattatttatcatattatataataaatgtatacttttaaatcaaattatatattatgtagtgacatatagttaatattattatataattttgactatatatagtaaaacataagtgaatacaccctcaaaaatgtttaattcttaaaatatgtatggtcaaaaattctaaatttcatcctagagaaatagctgactccacattcggagagaaaatacaggagatgaagtcagaacttcttatcatgcaagaaagcaaagacatcaccacataccatcagattcatgttacctgaacataaagtctatcatgaaaagttcccaatggcaaaatgtggaatatttatagaatcaaataatataggtagtgtattaaaactaatgaatatgttcaaagcctatcagtttactactgttaaaaacaaaattaaaaaacaaaaaacccctcaaatatgaggaatgggaaaagaacaaaatctccacatcaaaaacgtggaaatgaaggcaagaagcaagatctcttttgtttatctgaagtgttacacaggaaacattcttttctgtagaatgtttctacataataataagtatagtaatagctatagtaatgtttttgcctaagaatagctgtagagtttttgcataataatagttaaccctgcaaagcttggataacctgtgcgttgagtatacaagcaataaacatcaatggctgccaaaacccttaggctgaaggttgatagtgaatataataacgagtggatcctgctgatagtacagccatcagtacagaattgcaaggtggagaatgcaagacacaagcaaatgagccattgtgtctcacttctgacattttctaagcatctttttcaccataccctcaaatctagaccgttatctggctgggcgtctctatgtttcttggatttgtgtgtcaaactctctagcgagtttaggaaaatattcatggactatatcctcaaatatattttccaagttgcttattctctcttcccctttcaggaatgctgacaagtcatacatttggtgtctttagataatatcatatttctcagagattttgttcacttttaaaaatattttttccttatatttgactgatttgattcaaacaagtcttcaagctttgaaattcttttcctcagcttggtctattctgctgttaatgcttctcatcgtattatgaaattcgtgtcatgaatttttcagctcgagaagttcagtttgggtgtttcttaaaatttaatcgttcatgtcattaatcattttactggattgcttggcttccttggattgaatttcaactttgctcttgatttgaatgaccttccttgccatccagattccaaattctacgtttgtcatttcagacaattcatactgattaagaacaatttctggggagctcgtggactggtttggagataataggagttatttccctgattttttttctcatctgggagggttgctattcctttcattgcaagggtataaattgagtatagtctgttggctttatttctggaagttttcaggggactaaggctctgtacagggtctttgctgaattcttgctcttggttttccaggcggtagaatttagtaaagtgatttttggtgttgtagtgtggctgtaatccagtagatggcgcttgagagcaataggcaatagacaggctcttactccactgcgtggtgcctttgtttatctttgttcttgaccttgatacttttgaaaaggtcagagcagtttttttgtttttgttttttgagacagggtctcactttgtcacccagggtggagtgcagtggcacgatcttggatcactgcagcctcaaccttcccaggctcaggtaggtgacagagcaggcaagttaacttaaggcctcctccttggcaatctggtctcaagtaggggacaggtccccacagacagaactgaggggcaagtgtggcatgggctccagaccccgagcactggaattagacacctctcctttgcagaaaggtttagcctttcctcaagcggttctgcaaaggagaggtgtagctggggtggcgtgggcaatggtggtggcagagtttgtgtgaaacttgtctcttccccaatcactgtcacttgtttcaggagacgttgtaatgtgctgtatggtttgacctccaggccagtaggtggcaattgctggtgagagccagttgtagcgctggcagtgggctttatgcttgacctttgttaaccagaagcattcaggtatcctaagtgatgggttgggttgtggaaaactcagtggtcttgatcagtactctgcctccaacgcagggaaatgaaggtaagtgtggctggtccaggcaagcctgtactcaggcccaatgctaggcacaggctccgtccccacagaggctacatgtgtggttctcaggtccctggagagacactcaagcactgagtagggcaatgactattatgccaaagttacagcagagttccccagaggggcacgttgggttccaagcctagaaaatgacagtgggactcactttaatctaatgctcccaacccagcagagctcctccctgtggcccaatgctggaagcaatttcagaccgtcaaatcacatgcggtttgatgtcagaccactcaactaccccaggccacagatcttgcctcctgggtaaaatccatgcctctcaggctacaacttttccccctcggttctgtcaaagagaggtgtccaacgccagtgcttggtgtctggagcccatgccacaattgcctctcagttctgtccatggggacctgtcttctacttgagcccagattgtcaatctctggcccaagactctccgaagtag[138 bp omitted]gcctc[358 bp omitted]aatggcctctttctatcagcatccaggtctgggagcacacatggagcacttccctgggcccttccttttcacagtcctcccgctgttccctaagtcagatccagggcttaggtcggtcaaagagctccccagtggcctggattgcctggctccccactgagaatgggtatcatgtggtctcataacttccctctcaggcactggaagttcactcatggttttctgccaggtcttgctgcatgagctgctgcctgccttctttttagcagtatctgagatttccttcactttcatattcaactcctgtattagtccattttcaggctgctgataaagacatacccgagaccaggtaatttataagaaaaagagatttaattgactcacagttccacatggctgcagaggcctcacaatcatggtggaaggtgaaagcaacatctcacgtggtggcaggtacagaggaaatgagagccaagcaaaaggggaaaccccttataaaatcatcagctcttctgagacttattcacgaccacaagaacagaatgggagaaactgcctccatgattcagttatctcccaccggctcccacagcacgtgggaattatgggagctacaattcaagatgagatttgggtggggacacagccaaaccatatcacctcccatgttctttcttggatacaagaatgcagaatgaatctctacacaccattttggtattttcaccatctcggaagacataacagtgtattatatccttaaaaatcactataaaagtagattttaagggttcttaccacacaaaaattagaaatatggaaagtaatgtatatgttaattagattgatttgcccaacagacaagtatatatatttcaaaactacatactttacacaataagtatatacaatttaggaatttttcttttttctttttttttttgatggagtctcactctgtcaccaagctggagtgcactggtgcgatctcggctcactgcaatctccgcctcctgggttcaagcgattcccctgcctcagcctcccgagtagctgggactacaggcgtgcaccaccacgcccggctaattttttgtattttagtagagatggggtttcaccatgttggccaggatggtctcgatctcctgaccttgtgatccaaagctgtgttatgaacatgaagttctaaacacattttctcatatgttcacacatgtctcattccagcctcagtgctcatggggtaggatctccttacctgagaccacaaaccctgggggtccctggggtgtgaaaacaggtagggggaggtactctataagacatagcacctgtaggtcctcccagcattcatggagaattcagcctgtactgctgagcttggtactttgatattagacacaaaggtagggatctgctgctcccttcttggaaataagaaaagtgtcactgatgtagcaggaccatgttctttcctgaggccaccatggagcccggctgcaccaacagggaatatccctcaggcagctgtcctagagagaggcaggatgggtgaggggctgcccccaccttgttctgagcagagaccttcccagggcttctctctaggaccctcagtctctctgtcattcactgtttcctctgagtctcttcctctccctcccatccaccttgcccctctgtctctttccctctctaaagaaccttatccattgacatggtttgattgtgtccccacccaaatctcatcttgaattgtagctcccataattcccacgtgttgtgggaggaacctggtgggagataattgaatcgtggaggcggtgggtggtttcccccatactgttctcctggtagtaagtctcacgagatctgatggttttataaggggaaacccctttcacttggctctcatttctttcttgtctgccaccatgtgcctttcaccttccaccatgcttatgaggtctccccagccacatggaactgtgagtccattaaacctctttttctttataaatcacccagtcttggggatgtctttatcagcagcaagaaaacagactaatacactcatcatgctggtcatcaccgcctgcagatccccagcaggccctgtgcagaatctgggtccctgagtgaacctgctggacccctcacctgcaatagcatatccagggg[137 bp omitted]caaaacccagtctctactaaaaatacaaaaaaaaaaaaaaaaatttagccaggcatggtagtgtatgcctgtaatcccaggtacttgagaggctgaggcaggagaattacttgaacccaggaggtgaaggttgcagtgagctgagatcgtaccacgcactccagcctgggcaacaagagcgaaactccatctcaaaaaaacaaaaacaaaacaaaacaagaaaagaaaagaaaagacgttgcgtttagcacagcatctgtcctggctcccatgggagccactccaaggaaacgtcagcctgacggagcccagcctggggctgccagccatggtgccagggtggtcatgtcgcctctcctcagacaggaaaagtccttggtggccaacatcagagcaacactggaaggtcagactctctccagagattaggaggggcccctgtttggtcccgtgcagggagtcctagacacacctagagggaaagacaagtcaggactttgggggctgactcccctcaaatacatcccttgtcctcctggctctgcagatctcaccatcacttatactctgtgtctctggccccagaagccctcgttcccctcattccaccctcacgcttgggacttgcctgggagcaagatccacagcaacctgtctgatgcttcaaagaatgtttggggtaaagatgggacttcctcacctgagaacaggagcttcagggagttgctgaggtccgaccacacctgaagggtgttctgacttcctcacctgagaacaggagcttcagggagtcgctgagttccgaccacacctgaagggtgttcctgttattgccatgacatctgaacatccatctgtggctgagggtcttggggcccacaggaaacagagcttgggactgtccactagggtgttgctgagagtctagggtgcaggagagactgagttctccttcctcggtcagaatgaatctgtccagttgcagccatgagccacgctggagagtcctctcctaaagttgcaacaggctcaggggggctgagaaggtagattttctgtagaatcctaggagagaaggaggtagtgtgatccttgaggctcaagcctcccaccttatcccttagggctgggctgtgagggagagacacccctgagagcagacccctttcctgagggcagagcctggggctgggaccccaaggtgtcctcccacctatcaccaccagctccagggagtcagtgagctctggggctgaaatagtgacagtaatatcatcctacatattcatttgtcatggatatgatgggggaactcggccttgtctccaggctgcagtgggctctgtctgtcccaggacactgagcttccctcttttttttttttttttctttttttttttgagacggagtcttgctctgtcacccaggctgcagtgcagcggcgtgatctgggctcactgcaagctccgcctcctgggttcacgccattctcctgccacagcctcccgagtagctgggactacaggcgcccaccac[131 bp omitted]caccacgcccagccccctcttttttttttagttggagtcttgctctgtcaccaggctggagtgtagtggcacagtctcagctcactgcaagctccgcctcccgggttcaagtgattctcccacctc[134 bp omitted]gcctctcaaagtgctgggattacaggcatgagccaccgcgaccggccctgggcttccctctttatccaatcggtactcctgggcctccaggttcccctgacaccagagggtcacaggcctctcccaggtgatcacagagcctgtctcagcccatggggagggtttggggaagggccctgaaatggaaccagaggctgggtcccaagatctctttcactcctggttctctagtttagtccaaaacccctctctgttttatcaccctcagcccagaacaactgtgccccccaacctgagagcccaggggctggagtaagagggaggctcgtggagaacctggtagccccttctccctccatcactgactgaggcagagaagcacgaacaccgtgatgcctgctctgggggctccagctgtgggagaggagaccacagggccctccaggacagacagacacacggatgtggtcactcagagcctgctgctgcccgtccaggtacccacagctgtggacccacaggaagggaaactgcttttccctgggcctggctctggttttccctgggtgggggagctcaggaggaccccagactctctggacacatgagcctctgctcccctcccctgccccaggtcaccgtctctgctgcaggtgggacaggacaggcccctgtggaatcgggtctgggagtttccctgggaggcctcctctcccaggaggtcacagctgggagtcagagctgaaaggaactttcccacccgcaggcctctctcctttacacttggagaaactgaggcccaggcagaggaggggcctgtccacatcaccacctccagaggagcctcaaaccgatgacagaacccacccctgcctcccctggaccccgcccacctcccactcaaagcccctcacttagcactgtgggggcctgacgttgtgggggtgaggggctggtccttagggcctgctgggtcaggatggggaggtgagggctggggctgccctgctccccacgtcagcccggctgctcctcccccaggctgggccccaacatctccctctgcctcgacccccgcccctcaccagcccagcctcagagccccggggagcctgtggcccctcctctggctctgcctcagctccctggagggaagctcgtgcttgagtccttgaggggaatgggatcatctgggagactcaggactgccctgggggaggccaccctccctctgagcccagaggcctcaatgactcaccaggtatggagaaggagcctatgggtggagggctggggcccctggagggtcctgggaaggagcacagaaagggagtgaggaattggagctatcctggagtccccacctccactcaaagctctcctctccatctgcccagtggcctctccaagaccctccctcttcccacctagcaccttctggactccaggtgaaggagaagagggagaactcctgttggcttcttctcctctgaggggtgaattcctctgtggctgagtctccctcagagcccccttcactccatctctgcccagagctctcctgggggcagggcctgagctgagtctttgaacttagagaggacagggtcagggcctttcacccaagaccaccagctccgactgcggtgtgatagcaggtagggggaggtgcagtcatgtgagaatcttgaaggtgcccatgaagggagtgtttataccacagtcatcaacaaattccacaaataaatgctttttagaaaacttttttgttgttgttcaggaagccagtctatgcgcacaacagcaggcttttccatcaaacacttctcttttgattcctagtgactgtatctctggagaaactacagatgaagagtgacaggtggtacagcatcactttgaacttaaattttccaaacacgaatctgatttttgcccatggatttaattatcaaaagcaaattccatgttatgagctgaagagatagtcccagtaatacacattagaaaatgcagtagttagaaataaagaaaggtgtattacctgaaagtggagcagagcatgaggtcacagaggggcggacccaaacccaccataggggtgaagccttacatcatagggaagaaaaacgaaggaaggggcagtcaaggagagtcgacaatgaggaggaaagcaccacagtttaatggaggaagcatcttctacagacacccagacatcttcctgcacctgacccatgcttcttccccttgatattctcagcagacacttccccaactgctgccccagtcttccagaacctcctcagatcatcagatctgttcccaaggctccaccactctgaagggtgcattgtcctttctgctgtttgcctcctggctgcaccttggggggcttctctggctgtgctgagcctcaaataacagaatcccgaggaacagcaggaccaagccagccacacccatgcggatgagattctccactgtgtaatcctggaggtgtggggctagggatggtggacaaagaggtcacagaggtcagggcagatcacaattaccaaagacccctggatgtccacccagggtacccacctccccttgacaggacctgaccctctgtgcccagccccataactgggagaatctcctcactcaccagtcttggaatctgacttcttttgtgctggattgagggtctcagttgctcctaagaatcaaagaataaggatgttggtgagaagctgaagagcctctcccctgggcaatgcattcttatattcctccacctctcatggtgtgactttatgtagatccttagtgaacacattctctgctctcacaggcctcccctggtacgtcattgggtttttcaacctctctgtgctctgggaattcagatcttgtgcctgagtcactttgaaacaaagtttacttgagcccaggagctcaggattagtaagaagaatgatcccccaactagaaagaattgagctcttgtgtgctgtcttggatgtgcaatcttgtgcaacaagaacacaacaactaattcccccagagacagaaatttccatttttcagtggatgaggacccagtctctgtggatgaggagttggtcctcagtcactcttggaagtcaggagcacaagcaagggctggaggctgcaacggcccccactgtgtgcgcctcagacagctcccctgtggtttcatcatccatttaatgtcttgttaactaattcttcatatagttaggaaacctacaatgtgatatgcttaaatatgaaaatgtattcttttctaaatgataatgactaagtgggacagaaaaacatcatttctgcttttttgaagtatgaacctagattggaaggtgaaaagcaaatatttaaaa[131 bp omitted]cggtgaaaccccatctctactaaaaatacaaaaaaaaaaaaaaattagcctggcatggtggtgggctcctgtagtcccagctacttgagaggatgaggcaggagaatggcgtgaaccccagaggcggagcttgcagtgagccgagatcgcaccactgcactccagcctgggcgacagagtgagactccgtctcaaaaaaaataaaataaaataaaataataataaaaaataaaaacaaataaatatttaaaaatctgatgaaaaatattaagcacaggattgaatacttgaatatatgtttgtgtctatatatgtacatagcacatatattcatataaaatatatgtgattaacatggtttataaaatatatgtgattaacatgctttgcatttgtgtctctctcaaatctcatgttgaattgtaatccccaatgttggaggagaggcccagtgggaggtgattggcttccccctggctgctctcatgatagtgagttgtcacgagatcttgttatttaaaagtgggtagcacctcccccttctctgtcttcctcctattccagccatagaagaagttcctgctttccctccgccttctgccatgattgtaagtttcccgaggcctccccagccaggcttcctgtatggcctgtggaaccgtgagttaattaaacctctttcctttataaattacccagtctcaggtaggtttttgtttgtttgtttgtttgtttttgagacggagtcttgctctgtcccccaggctggagtgcagtggtgcgatctcagctcactgcagcctctgcctctgggttccagcgattctcctgcctcagcctccaaggcagttgggattcaggtacccgccaccatgcccagctaatttttgtatttttagtagagatagggtttcg[140 bp omitted]acaatgattatagatacatatgtatacgtggctttagatatttgtttttaaagtatatatgtaactacgtatatattcatatttgagatgagaaagatgggcttacaatttggaaatataaacgtgaaatttccaattttttatggctgatataaacatcagccccagcatcttccccttgtccatgtcaggcctggacccccggaccccaaatcccgctcaggtaggggaggacagacctgactcctccacctatcattgctgctcccttcttcctgcctggttctaggacacctccctcccctctgaccaccacagagggaacacctgctccatcctcagagccccaggaagccacgtggaccacgcccttattgtccactctcccctctgttcctctgaggaacagacccctttcctgaatattggagataaggttgagatgagtctagaatattatactgggtcagagtaactgcgctttcatctcccacggggtcaggacttagaggctggggacacccagatgttgattctgagatggagacatcaggaagggagcaggtggggcctccgtcttccaccctcagtctaatctcatctcctccaaggctcacccccacctgcttgcagccctctccactctttaccctactgagacttcaggggtgggagcccagggtgggaagtcctcatctatttccacactcccataggctggaccttcccctcggtgggaggttcccatgtatttccacccttccatgggctgggccctcccctgtggaccctcccccttcactgtcctgttttcttagtgtcctgaactctcctgggggcagggcctgagctgagagaggctcagggctcacaaaggccggggctgatggaggaagaagtggggcagcaagtgagacagacagacggacactctcttggaagctctcctttttcatttccaagaacccctttgagctcagagtggacagggtcagcgccctcacctgagaccacgagctccaggggctcactggggtgagacagcaggtaggggttggagctgcgtgagccgtagcacctgtaggtccccgcgtgggctgaggtcacaggactcatggggaattcagcctggtacttatgagctccgtacattgatctcagacgcaacgggggatgggctgccccctccttggtcagaaggaaagtgaacatcgggtcccatgactgacacagcagggtcaccttctctcctgaggtcaccgtggggcccggctgcactgagagggagggtctgtcagagatctgtcctggagaaaagaaggacgggtgaggggctgccccaccttgttctgagctgagacctccccaccagtcctctccctgggaccctcagtctgtccctgttttctctgagtctccccctccccgcccatcccctgtctctgtctgtctctccctcccttaggacccccacccctcatcccggccatcaccacctgggctcccccagcagggcctgtgcagagcctgggtccccctgactgaacccgctgggctcctcacctgcgatcaggatatccagggggtcactgggggccgaccactcggaggagacgttgtgtgcgccgtagcatctgtactggcccccgtaggagcggctcacagggctcagggtgaagttggcctgggagagcccagcctggggctgccggccagggcgctgggggaggccatcggccccctccttgtacagagtgtatctgatgtagccgacatcagagccacactggagggtcagattctctccgggggtcacgacagggccctgcagggtcaggagggagggcttcctagacacgcctggagggaaagatgagttgggactcggagcggctggttcctcctgcgccccttccttctgtagccttcctcactagggtttccagcgtccttgtttttttctcattctgtatttgtgtccccagggcccccatcttcccctcatcttttcttcttgcgtgggctagcccgagggtaaggctcccaacagctcacctggtgccctgactttgtataaggaaaagctacggcttcctcacctgacaccagtagctgcagggggtcactgggttccgaccacacgtatggggtgttgttttcatagccgtagcatctgaatgtacccctgttgctgaaggtcagggggcccatggggaacagggcctggaactttccatggttgtgttggtgtgagttcagggtccaggagagcctgtggtctccttcctcaatcagagtgaacctgcccagtcccagccgtgaggcacaccggagggtcacgttcactcctgaggtcaccacagggcttggcagtgcggacagggtgggtctgctgtaggctttcaagagaaaaaaaggcagccgtgtttaaatggggctcacacctcccaccttatcctacaaggctgggctgtgagaagggagacccctcgagagctgagagccgacccccttcccgagggcagagcctggggctgggacccctgagtgtcctctcacctgtcaccaccagctccagggggtcgctgggctctgaccagcctgcagggctctgatagtaacagtgatatcgccctgcatgttcccacatcatggatgggatggagagtttgaccttgttttcagactccagtgtttttaatatgtgcctcgacattgagtttccctctttatccagacggtacccctgggcctccagggtgccctgacaccagatggtcacggggttatgccaggtgatcacgggacctggctcggcccacaggatgggtttgagtaggttttctggaaggaaattacaggttaggtcccaagatgtcctcaaccctcagatcccagctctcagccccaggacccccctcatccccatcagtcagcccagaactgctgtcttcacccccagctgcccaggggtggtcccttgtccccagagaggaggagggacctaggacagctggggacagactcacctgcctgcacccgggtcctggggcccaggctcagccctggaagagagttccctgtgagagatttgcctccgaagcctgagcaggtcttcttcttttccttgagcccctgggatgccctaattgactaaggcatggctatggattggggtctctctcctagactagggtctctcctccccctcttaagatctcaccaaagaagagcaggcttgtgagaatgagggtcatggcatctcctcctcctggccctggctgtgcaggcaggtgtggccacggtgcccgtagacacagacagacacatggtgtgcgggcacacggaggctgggtcctccccatcacgaggttgtcccatcagcacaccgacagaaagaggaactgcccctccccaggaccctggctctcatttcccagggcttgtcctgggggtgagcaccaggctctctgccgatatttcagacacaaatggggattcacaagggggtcgttaagaaggacattttcggccgggcgctgtggctcacagctgtcatcccagcactttgggaggccaaggtgggtggatcacttgaggtcaggagttcgagaccagcctggccaacatggcaaaaccccgtgtctactaaaaatacaaaaatgagccggtcgtggtggcacatgcctgttatcccagctactcgggaggctaaggcgggagaatcacttgaactccggaggcagaggctgcagtgagccgagatcacgccattgccttccagcctgggcaacaagaacaaaactctatctcaaaaaaaaaaaaaaaaaaggacgtttccatctctgtgtggcacagaaaaggaagtccagggtcctcacagacagggaggaacctagggctccaggtgaaagtgagacgctgtggctgcccctcttctgtgtttgcacatgggcactgccatctctctgcttccttgtgggagccatgaggggcagaaagaggaactgcccctccccaggagcttggctctcatttccccagggcttgtcctgggcgtgaacaccaggctctctagagatattacagacagaaatgggctctcccctcactttggctgcgtctatctaatctgtcctcatctcaccaagggccaggatgtagcagcaaacagacccggtgccttcttgattcagccccttccaggtgagagggactgatggttcctccttccctctcagagcctccccatggaggaggctccatctcccctgtgtgtgtgtgaaaaacaggctgtctgtggtattgtcacacctggacatctgtcccacacgtgagtgggaggtcacattggactccgccttgccagccacaactttgggcagatgctaagtttggaagagttgatgctcctggacaggagcagctgtaaccacccgctctggacaggcctgatttctgagtcgtctctgggagaaatgttctttgtaagatcatgtgcatgggggtagatggacagcatgcagtgtatttgagaagagatagacaactagaaattatgtaggcagatgtggctgtggtgaaaatagtaggtagaattaacacacttaaaaatcaattctatggccgggcacggtggctcgcacctgtaatcccagcactttgggaggcccaggcgggcagatcacttgaggtcaggagttcaagaccagcctggccaacatggtgaaaccccgtctctatactaaaaataacaaaaattaggctcatttttgaatccccttaaacattaccagcccctaaatgtctgctctatggattcttctttgaattcagtattaacatctttcccgttccctcgttaatagtaagctaaataaaaacttgtgtccattttatccttctagaagagcaatttttttttacctttttgaaaaaaaaaactttaccaaaatatatttaagatcaagaatgctggtcataagctgtgaaaatctatgtcttgtcttaatcattccatcagcataaaaaatgtagcaatgcatgtgaagtgttggttccaggcaaacctgcttaagactcaatgttcaaggttgttattaggtgggggccatataggcataatggtcagtcacagggaaaccagggaaaagctgctgttcatcagcatttttttttttttacaaactcatcaacagtgagctacattgtttgcggaaatggcctagtcaagacacagtagaattcagtgctgcagtcacacaacaccagcttatctcttaggaacatagggaacattccaggagccatgtttaggaactagatgccagctaaggaccaactttacaagcaaactctcccaacgttatcacccttgcagctgtgagattaactcgttcttgcacaccctgtacctgaaaaaaataatagtcctcttgaatgcagcagcaccttgttcacccggaacatgcctccgctcctccagattcttcccgccctatctcagtttttttctgcagattctccaaggttctgcaaactgtaagcagtaaatccacactcaacttgagttttcatgagggaagccgtctggggccttctctggctgtgctgagcctgaacgagcatcccccagaggccaccgggatcaacacagcatggtcattgggatgagattctccatggcagaggctggaggggcgtggtcagtagacagaatggagcatttgctgagggctagactggccacactcacctcggaagccctggatgggtgtttacacatctacactctggaaaggggagtcccagttattcctcactatgggtctatacttggtggaggttggttgagaggatcagggactctgtatgcgtctgttctcactctgctatgaagaactacccaagactgggtaatttataagaaaagacgtttaattgactcacagttccatatgtctggggaggcctcatgaaacttacaatcatggtggaaggcacctcttattgggcggcaggagagagaatgagagtggagcgaagggggaagccccttataaaaccattagatctcatgagaactcactcattatcacgagaacagtacaggggaaaccgcccccatgattcaataatctccacctggtcctgcccttgacatgtggggattattataatccaaggtgggatttgggtggagacacagaaccgaaccatatcagacacctatgaataagaatgaggtggggcatgagtagccagaccaccattgtatcccccgaccagggcgtataacccaccattgtatcccccgaccagggcacgtaacccaccattgtatcctccccacctccagggcatgtaacccaccactgtatccccccaccagggtgtgtaacccaccattttatccccctcagggtgtgtaacccaccattgtatccccctccagggcctgtaacccactatgccctggctccttcacaactctcctcccttctcatgggagaattgtatgagatccttgctgaccccaactcccagcttgggcttagaaccctatggtcccttcctcaaatatgttcaggttcctgggccttgttgaagtcacagacaacttctcagctgcagagatattgcgggtttggttttacaacaactcagggacagaggacaaaaatctccaacctctggaatgcttaactctgctattccctggtctcagattagtcccaaaattagttaaacctaagcctcacgctttgacctctagtaatgcgtcagctgtcagtatggaatccatagatctgcatgtggggctcctggtgtcccagggccaggaatatgaagcagccaaaggctgtgactgccttttcttttctttctttctttctttttttttctgagatggagtctcgctctgttgcccaggctggagtgcagtggtgcaatctcagctcactgcaagctccgcatcccggggtcacgccattctcctgcctc[134 bp omitted]tgcctcccaaagtgctgggattacaggtgtgagccactgtgcctggccttattttttttttggtcagggagtcttgctctgtcgcccaggctggagtgcggtggtgcgatctcagctcactgcaacctccgcctcccgggttcaagcgattctgctgcctcagcctcctgagtagctgggactacaggcatgtgccaccatgcctgactaattttctgtatttttagtacagatgggacttcatgttagccaggatggtctcgatctcctgaccccattatccgcttgcctcggccccccaaagtgctgggattacaggcctgagcccggcccccttttctttttttgtacctcactcagctctctgcattctctggttcaacttaatagtactactaataacccaagtaataatctcactattcttctgtccatttatctgttttgttttacaattaatgagagaatagtcatagattccaagtaactttttcaggaataagaaacactatagtgaacaaaacctcccattgttcattcaatttgtaatagaaatggagaaagtcagatgaattaagcaaaaatacaaaagagatgaactattatttaaaaacaacacacagaggcataaatgcacaaaatttaagccacctagaggtcttgaatgtgtgttgcccttataaaaaaaaaaaaaaacagtgccagcctggccaacatggcgaaaccccatctctactaaaaacacaaaaattagttgggtctggtggtgtgcacctgtaatcccagctactcaggaggctgaggcaggagaatcgcttgaatccaggagggagagattgcagtgagccgagatcttgccactgcactccatgctgggtgacagagggagactctgttaaaaaacaaaacaaaaacaaacaaacaaaaaaaagcagtgagtactaggggcaaagatcacttaacccagtttgtcattaaaaaaaatgtttttgaggatgtgacaggttaggtaaagactgaacaatgagcaagaggaggatccagaaaggtaatattgcccaacataggagcagatgattgcggtattttgataccagaaaatgcagaaatgttcctagtgtgtctaaaatgtatatgagaatgaggaaacggaaaaagtggtacagagctgtatttccagatgtgcaaacagacgtatgaacatcgacatgtgcaatcaattgttaactgaaaatcaatacagaaataaagtgagaaataaaaacacttatctgcaatacagccatgagtctcagagcacggcgtgtggagaaatgtacatacacggggtgtctctgagaggaaacagaataaagaggtacttgattgcctctggagatggaaattgagaagatgggagcaaggatcacctctatgcccgttggtaaatatatgtttgtgtgtgtgtttcttttttttgagggaacaaggatcacctgtgtgcccactggtaaatatatttgtgtgtgagttttttgttttgttttgtttttgttgttgttgttgtttgtttgtttttttagatgaagtctgactcttattgcccaggctggagtgcagtggtgtagcgcgatcttggctcactgcaacctctgcctcccaggttcaagtgcttctcctgcct[133 bp omitted]tttggcttcccaaagtgctgggattacaggcatgagtgagcccgcacccggcctgtatttttttgtttgtttgttttttttcagtagagatggggtttca[143 bp omitted]tcttttcttcaag[134 bp omitted]ggccaagaaggtgaaaccccgtctctcctaaaaatatgaaaagtagccaggcgtggtggcgggcacctgtaatcccagcttctggggaggctgagggagataattgcttgagctcagga[135 bp omitted]gaccagaggctgggcgcggtgtctcgtgcctgtaatcccagcaacttgggaggccgag[267 bp omitted]cacacaaaaacaaatccagaccagcagtgattttccctaaaatgagaatcctgagataggagcttccgtactcatcacaattggagtcaactttcacgcagacctcaaggtgtccaagtactttccatataagtgttgctgctaaaaataaaataataataatacaaactccaggcctcttggattctaaaaatgggagttgtgtatctcttttttctccaaatttagcctggcctctcatgcttgagttgtctacagcagcttccatgagttcccagtgtggttgaaatcataaatatgccttctctttcatttccctttttcacatccccaaacccacgtggtggttcagctggggagctatatttccttggggaggaaagtagcacagtgggtgtcatacccaggggagattaactttcgggtcctgtagttgcccctaccagggtgagaacctggtgctcatagaaacctgctcagaaaatcgctttcttgcttttgttccttcctccacacaatggccacagttactggtggagacaaaatgtctggagtggactggagtccaagaaaaggtacatcgggcatttcctcgcctaggaagtcactggcacagaagttcagaaatgagcgagattttgaaaacaagaataggccgggtgcggtgtctcacgcctggaatcccagcactttgggaggccgaggcaggcacatcctctgaggtcaggagttcaagaccagcctggtcaacatgggaaaaccctgtctctaccaaaaataaaaaaaaattagccgggcgtgatggtgcagggctgtaatcccagctactctagaggctgagatggcagatctcttgaaccctggaggtggaggctgcagtgagccgagatcgcgccactgcactccagcctggtagacagagcaagactccgtctcaaataaataaataaataaataaataattaaaacataaaaaaataaaaattttctcggggagctgactatgagaaggcagaaatatgttaatatctccaggtgtctgtctggggtgtggtgggtgggaaaaaggcggaagtggtttcctgtaatgaatttgctctgtaggaaggagccatgttttttggcgctggggatgttaacttagtcctggtcatcaacaacatgaacatcaggcagagatacttgtgtcttacttggaggaagattcagacccggagaaggattttgatcagggaagagtcagctacagataaggttggggctatgagaataatagatgtcagcctggagtgagggtttggagaagaggaccaggaggaggctgatgtggtggcacagacaggctgtcttcagtctccagtgagcttgcactgtgggaatggacccggggacgtgggtgaggagggctcaagggtacaactgcttggatttgttcactgtatgtgaaacaaaagtgagtgagcaactagggtctgtttcactctctgccttagtttactggaggaacgaatggtgtcatcccaggatgaatgatcccggggaagaaccaggctagggagatatttataaggctgttcacggagtgcagaggaagcactgtctccctcctggccctgctgtctagttttgtttctcccaagcacttcttccctccgactttcttaattctataagtagcagcaccagaacgcgatcatgtctgttgcagagatgtgaatggagctggaggtcattatccttagtaaacaaacacaggaacagaaaaccaaataccacatgttctcacttataagtgggaactccatcaaatctccaagtcatttacaacctcttcttcccctgtccataactcttcatttgataccgtgaattctgtctccatgctttgggccaaagcattcactggaagaaattcccaagctttggtttaaggcatgagggttcatacttactgtcagttgaccttcagcaggtgacatcctcccctgccccatccattttcctcgttgtaggaagatggtaattaaccctcccgtcaagtttttttgttttgttttttgtttttttttttcctgacagcgtctcatgctgtcacccaggctggagtgcaatggcacgatctctgctcactgcaaccttgacttcttgggttcaagcgattctcctgcctcagcctcctgggtagctgggattacaggcatgcaccactgccaagcgtgtccatgtgaagagaccagcaaacaggctttgtatgagcaataaagcttttaattcacctgggtgcaggtggactgagtctgagaaaggagtcagcgaagggagatggggaaggggttgctttataggagttgggtaggtgatggaaaattacggtaaaaggtggtcatctattgttggcagaggaggaggtcacaaggtacctggtggggacatcgtaagacttattatccagaagaagaatgtcacaaagttgattgatcggttaaggtggggcagggacaagtcacaatggtggaatgtcgtaatgttggttaatcagttaaggcaggaactggctgttttacttcttttgtggtttttcggctgccccagacttcttggctccttcaggccatctgggtgtatatgtgcaggtcacaggggttacaatagctgagcttcagctcagaggcctgacaaccaccacactggccaattttctttttttttaaatttttagtagagacagggtttcaccat[138 bp omitted]catgcagaagagattaaataaaattagacggatataattgtgtcttgtttcttgttttggtttagaaatataagtgtattttcttgaatagatatgatgcaaaaatatttttaaatataactcataaacttaaagataaaacctaaagaaaaagaaaatgcggtaaaacaggtgggaggggaagcaggaaaggcaggcacactcgtgtaactatgattgaaagaaaatctgtatacaagtggacctgcacagttcaaacctgtggagttcaaagctcaactgtatgttactgcaaatgattataagtgctgttatagaaacattcaaagaccagaaaaggaccacaatggctgaccacacatagccaggaagagcttctcccaccgagagaccaggccatcaagaagaccagaatgctctgggcagatcttctgaaagagggcgctgagggtggatggagagaggacacagatcctgaggatggatggagggaggacacagatcctgaggatgcatggagggaggacacagatcctgaggatggatggagggaggaaacagatcctgagggtggatggatggatggaggacacagatcctgagggtggatggatggagggaggacacagatcctgagggtggatggagggaggacacagatcctgaggatggatgaagggaggacacagatcctgagggtggatggagggaggacacagatcctgaggatgcgtggagggaggacacagatcctgaggatggatggagggaggacgtagatcctgagggtggatggagggaggacgcagatcctgagggtggatggatggaggacgcagatcctgaggatggatggagggaggatgcagatcctgagggtggacggatggagggaggacacagatcctgaggatggatggagggaggacacagatcctgaggatggatggagggaggacgcagatcctgaggatggatggagggaggacgcagatcctgagggtggatggagggaggacgcagatcctgaggatggatggagggaggacgcagatcctgaggatggatggagggaggacacagatcctgaggatgcatggagggaggacacagatcctgagggtggatggagggaggacacagatcctgaggatggatggagggaggacacagatcctgaggatgcatggagggagcacacagaccctgagggtggatggatggaggacgcagatcctgaggatggatggagggaggacacagatcctgaggatgcatggagggaggacaccacgcccggctaatttttgtctttttaatagagatggggtttcaccatg[137 bp omitted]atctgaaatgtaaatggtttttaaagaattcaaattaggattcatcaaaaataggactgtctttattgttgaaaaacattgtatttctttaataatgaacaacttattaagttatgatgtgatttaactggtatgaaaatttgggaaattagaatcttggtaaagtacagattagttaaaagaaaaagatgctttagaaaaatcaaagacatttccgaaagaatgtacaataatcaatagcagtttggccccagtgttatagaggatggggagaaggtggaagaatgagaaaataacacgcatttcacgtagtatatgtgcacaaatctttttcttttgttgcgaagaaaatgttttatcacaacaaatgtaataaatttagcaactttgttctggagatcaatcaataaatccaaataggagaaggaggaggggtctgtaaaagcagaaagcaatttcagaaatgaatatatatagtgtactaaataaattgagctggatggtaaataaaggcaacaagaaaatatctgtgaatcctagaccagctgtgatgatggctctgtatgcccttaaataacggcaataattcatgaaaaaataaagaccttgtcctttctttatcaaagtgatttattatttatttatttatttatttatttatttatttattttttagagacagagtctcgctctgtcacacccaggctggagtgcagtggctcgatctcagctcactgcaagctccacttcctgggttcacgccattctcctgcctcagcctcccgagtagctgggactacaggcacctgccacc[184 bp omitted]aggcacattttacttcttggaacggcaacaggaaaattcccatcccgcagctctcacaactcagatcttagcaattggaacagaacaggttgtcactgctgaaggaccaagcagaacaacggtttcaggaagctttagctctaaatcccagtagatgtagagcaggtgcagagctctggggactctcaaagcacttttaactctggttaagtgtcagaattgcatttagacatcaacacatttatattccttgattctttcttctccctaagccttaaacatatagtcaccttttatcaaaaagatattttatttgtctaaatggaagatatagtttactttcttcacacagatgccagaaattttctatgaacgtaaaatctttggtgcaatcaagtgcatactgcttcccagatcctacaagaaaggagattaaggtgtagaattttacactcatcacagaaagttttcagagactaactggcatcaccaaccaaaacacaacatgctatcaccacaactatttttaaatgtcttaagtagtagtttccattggacagcaggtgtgtaagcaggagccaagagtgaaacacgctcttgctcctcttcctagcaagagagcaaagactgtgaggtttggtgtattcatccagagagagtgttttaaatggggctatgacagagaaggtagacgaggtgttgggcagccctggacaccctcagaaaatatcccttcttcatgaatttattttctatgttcagttttacactaaaaggtaaaaaaaagttaaaaaaaagaaaaaaaaagtccaccctatagtttgtataacaaacattctcacttgttcatgctgtattcaacgtcgagcccattttctttcccctactacaaaatcccaccgctggggtcctggtacctacagtgatggttctgaataaagccctccttactctgctttgataaaggtcaccgggtaatctttctctcaacgccttgcccagctggcccagggctccaagaaagggaaggccagacccctggcctctgccctggttactcacagggacatctgtgaatatctgctgctgccccatctggccccggtgaggctgctcctccctttcacgttgggccccactgcagcctcctggtgttcaccgccagggcacaccccaggggaactggggtgggatcataagcacagggtaggccctccctctctgcctggccacactgcactgccaggtgaattaaacatggctcttcccccaggtggtgcttgggggcccgtgcagcaggagggacatcttctccgcacagcaatgttcccagatctcaccaccctgagttctggcccctgcgttgggcgggttggcaagtcaagagaaaaaacaagcccctgcatctaattttctgtcttctctctgggcccttcctctttccactaatatgtcaagaaataacagtgtggtatttttgcttaatttcccctaaactctatctgtcctgctttccactgtgacctcaccacctgaacttcctggacttccttacactggagcagacactggcatctgctcagctctcctgtgctctgcaaggggtagaaaaattcacccatcctctgctatgtgcagactgtccaccttctgctatagagttcatgtacccacctgtcaacctcatagtcaaacaaacaagacgttatgggagaaaacacccagctgatggttgaaaaacaaccagagaagaaagacagagatgtagaaaaagagacaaagacggctggacgcagtggctcatgcctgtaatcccaggactttgggaggctgaggtgggcagatcacctgaggtcgggagttcaagaccagcctgagcaacatggagagccccccgtctctaacaaaaatacaaaaaattagccgtgtgtggtggtgcatgcctgtaatcccagctgctcaggaggctgaggcaggagaatcgcttgaacccgggaggcagaggttgcagtgagccaagattgtgccattgcactccagcctgggcaacaagagcgaaactccatctcaaaaaaaaaaaaaaagagagagagagacagagagacacacagtgagagagaaagacagaaagagagacagggacagagacagacagagcagggagaatgtgtcccacgtgaagaacagggaaaatcggtcacaatgttcacacaagaaagcaaagatacagagtacagcactgggaagcagatcccaggaggaaattaaacctgagcacaaatagaaaattaaagctcagtacaaattaaaattgggtaggccagtcaggtaccaccctctttgaaccagcacagaaacctcccagcagaccgagctgcagcccatcccggggttcataatgtggagtcaggagcctcaggtgggtctgaagcccctgtctctgagacttggccgaccttggacaggttacttcatgtctcggtccatagtttctgtttttataaatgaggaaaataatagagcacgctgtggagggtttgtaggagaatttaatgtgtccacgtttgcctagaactaaattagcaactgccccatagaaagagctggctgagtt[137 bp omitted]tccctcagcctcccgagtagctgggactacaggcacccaccacc[182 bp omitted]aatgagattctgccgcctcctagtggtacatagggtaattttctgtgtcaatcagtacatctgaccctacaggtagggtggatactcagaaatgcctcaaccaacagcaggctcagtgattccttggatttcctggggcgtgtgagtgtatgtgcatgtctgtgtgtgtgcgtgtgtgtatgcatgtgtgtgagagcatgcattcctgtgcatgtatgtgcagatgtggacctgtagggtcggctctctgccttcacccagccacacctccctcattcattcctgatacacgtgatttgtcagaaaacactgacaccaatgtgaagtcctaagatgagcaagttcagaatatctaatgtatcgtatctgtggcgatgggtgcgctgaggaattgattgtgactgtcattgcacaatgtacgtgtacgacaaattatcacattttacaccttgaatacgtacaatcctgatcaattaaattttaaaaagaaaacgctgacacgttttcgtaagtcctgtttccctcactcagctttgaacaactgtgaaggcagagagtgggtccgagagacctatgcacccaggaccaggcctggggctgccagatgtgaggccttcaaaattatttattgatgcgtggagtaaagcacaacccagagaactgggcttggctctcagctgtgtgtgtatagcacagtctcaaggctagctcttgacttctaggaaggtctttagggtcagcagggcagataattacagcaaagtctctggggtcactggaggttcacagcagacacctaggacaagcttggaggtggcatcactgctcaggaaatcggctgattggctgtagctgggcctttagaacaggcaggtgactttagctgggtctctggaaacagtcaggtgaataaagctgggtctctagaaacagccagggaactgtagctgggtctctggaaataactgagaaacagtctgtccaaggagctgctcgattgtagaagggaccacctggctaacgaaccttctggatgctggttagaaacctccagtctccagctcttgtctccaggacagctgcctggctggctttctagatgaagaggaatccaacaggaagccttccaaatggctgcttcaggcttttcctagagtgactttctaccctcaggtgcagaggccaggtgggtatggggtcagtgtctggcaacggctgcatacgtgatggactcggccatgggctttgtggactgtggggacacagcccgggctgtcctctgtgtgagggcccagtggtccagctgagcatacgtcacctcctgggaactccctgcagccagggcctaagagggagagacccagggtgagggagtgcctggtggagggtgagacgaggggctgtggggagggagggctgtggcggccatctccatgggccctgaggaccctctcctaaattgcatccgtgtgaagagccctcccacagggtattggggttggtttacgtgacaatgaacaaggcagaagggaagactcctgacttccaagctgagccaaaagacatggtgcttctgtcccctccctgccacccatccttggatccctccctctgggggaagccggctgtgtggagaggcccctgtgagaggaacagaggtttcctgcccacagccggggaagtgagcgtcttggacgtggatcctccagcccacgggagccttcggatgcacacagccctgggcgacctctcgacagcaacctcaggacaggccgtgagccggaaccgcccagctgagccactcctgaattcctaacccaaggaactgagatttttttaagctgctaaatttggggtactttaataactagtaggaaggctcaccgaggtgtccgtctctctgtccttctcaggaagtccattgactgtggccttgtcttggggagaaaatacatggtcagttttctggggaggatgtcgcaaggcaaatctgcctgagacccccacccccagcttccgatgacatcctgcacccaatgtataatacgaccttctagaatgttcccaaagattcttccccccaccccccacattgcatctggattggcaccaagtccccacttccccatcccaggcctgtccctcctcctccccctttacctgctgtcctctctagaacatcaacagccaggtcaggcctaagaggaaaaataaaagtgaacctcaggggcagcctggcggccgaggactgggtggaggtccaggagtcattcccaggggcctcacctctgctgtggcttctgctcctcgtccttgcttctggggggccctaaggacagtcggggtgtgaattaaggagaccttcttcctagcctctcctgacagcttcccaggtcaccccaccctgcccctgagacctaccctgctttatctgattctggcgatggaggcagaagaggaccaggaggaggagacagaagaggaagaccactgagaccccgatgagaatatacagatgctcagctttcaggccttgggaagcaggtgcatctaagaaagacagaaacaggatttcagcagtgtgcatttattgagcacctactgtataccacacacacgtcacgtgcgtttcatagacttactaatatataaaatatcttaggtaaataatagtcctgcagtacagggatcgttatccccttcttccaccaccggggtcctgagtgctggagtcctctgcacagggacacagactgccattggcagagcaggaatctgatcaaccccaaagcctgacctctttctccttccccaagaggcacacaccagcttcatgctccacggcccccatcactcacgctcattgtgactgttgtccgacggcctctgcgtgggtcctgggagggaggaatcagaaggaggaggagttagagtcctgagctggacagagaaggctctgagtcctcccacatccactgtggggatctcccttcactccccaggaccctgactgctccctctagaccagcaccgaccagcagagtcttctgtgatgatggaaactttctacatctactgtccagcatgagagtcacacatagctattgatatttaaatttatccaaagttgaatggcatgagaagctggctgcaccgtctgcacctccaggactcagtgaccccacgggcctgatgccatccctactggacggtgcagatacagcgcgtttcctgggcgtgaagctgtagtagacatcgctaatttctgccctctgcggatctaggcagagaccaaccacccgcaacaagaggaagggagaccttccctccctgacctccttctgggttcccaccagagggcaagaatcctcatgtctgattttatctgccctcccggcaaccctctgacggggatgtaacccgccctcctgtgggaagaatccaagtcccgatgtgctcctctttcctgaagccctgcagctagcgggcgagtgtgtggggcaccgcccaggctccctacgcagcgcattgcaggcccgcccgtcatctcctccaaccttcaccctcctctgcacagtgcacgccactacccaattcccaggtggctaaatggggtcctgaggggctcccccaaacccagggtccgagccaagcgtccctcttccaggaacagcggtccctcccctcccccggggctgaggcagcatcttcaatatccttcaagaaaggcagacattctctcttggaatgtccttccctcctgcctcgtccacggtctaaggtccaggacaccacccgttattctacaccatgacttcctgggcttggtcttcataacatttgccaccatttaaaattacatatgtattatatatgtgcaatattacagtttttatattatttatagttatatgtatcatgtattatgcaaatgtataatatataacaaatatatttttaattatgtaatcttgacatatacatataatttaatgtatataatgttaattgtatatgatttataacttataatatatgttacatatattcactataatatataatgtataatttatatttgatataaacctatgattaaatataaaatattttttctattatagttatacataatgtatacataatagataatatatttacattaatacctatatttatttattaactataacacttgaaatttattatactatatattgtaaatatatctttcatataatatataatatacactatagtcatatgtagtgatacactaacatgttttattatataattatcttccttatatatataatatatatataatatatatatatattatgatgtaaacatatataatataatttaaattataggtctgaaattctacattgcaaatcatatatttttatctgtatatgcatgtatgggaatcagtgcatttctattgctcattctaactatttctccccattgaagttcacaagacgggaggccatttctcctcattcttggtgcatcaaatccggaggcttcagtgcctggcacagtccctgtgaggacaaaatacttcctcagtattaataggagcatccctcctttggggttttctaatcagcactgatgtcagcgccgtgtgtacctgaactcaagtctgccctaaacgattctaccaggacagctcttctattgcctctgtttcacatgaggaatttgggacacaggaggtttgggtgagtcaccgtcaggcatagagccaggaggtggcagaaccaccgggatttgaaccatgaacccagcaatctggctgcaggagggtctgtcctcgtgacctttatatgtcactgcatgaaggtgagagaagagagaaggaaggagaagaagagagggagagaaacagaggcaagatattcccgcagacagaaggctaataaaaaccagacactggacttgaaccaggtctgcgggactcaggagcatgtcccgctgtgccccagcagcccaggagcctctgagggggtccggatggagcacggcatcgctcctcccacctccccatgtggcttcagcccctggtcccacctgcctgagctcacagcccgagcctcacaggcagtcaccgggtctaggtccaaggacgtactctggggatagaaacccaggtggggaaggggccgcgaatggcttatgaccccgtgtcctcccctgggagtttctggtcacagatcacagggggagatggacaacttgagacccagggacttggggcagcttcaatcccatcacagagtccagggcagagccagatggaagggaagcctcatggcttcatcctggtcaccgttcacagctacgtcccctccctgtggagccctcctcctcttaagggaccttactccaccgttcaggcctcccccggagatcacagagccaacaggagcagccccgtccctctccgggtgtcccaggttggaaggtgagttctaagtccctccatcaggtgcagagcggggtgaatggtgaggccacgcccacaagggggcagcgtggagctcgggcgagcccggaagtctggggtggggctgcccgggtgggtggcccctgccccttcatggccttgtgccgttaagcacgaaactttaatttatgttttgcatattagagaggaggaggagttagaggatcagactagtacctcccccattaagtggtgcttgcattaagtgctttccacagttcctggcatggaacaaggttgcaatcacggtaccattgctgctatggtctctgtgagcattagcgacctcccagagcttggtgggtgtcggtgccttcccgtggcctccctagaccttgactccaagcccagggcagagggctggacccggaacagcatccgcagcacagattcccctgtaatcccctccagctgagggccctgctactgaccagctgaggagccgggctctgtgtccggggagtccgggcctccagagctttctgtaaacaggggcaggagaaggatttagaacccgtcccaaccaacctgccctcctccaccctgagcccccatccaaaggccgcatgaccatcacgcaatcccagacaatgtctcgagactcctgagaaaacggggcaggggacaggaggctggggagagccccgctgcttgccccattctccctggggctggtcactccctctgctcctcccaccacaagctcttcttgacctcaggggactgctgaggtcctggagggacatgaagatgggttggatcctctccagtggactttgactccaggacatctcgggctgagcacacacaggggtgcatgtggtcacataccaaaggttttcccaaagcactgtcccgccctggtcaggggccatccctggaccctgcgttctgcccagtgggagatgaaccacaccaggagaagcacattgcctggggcaggttctggctcagtggaaaggaataagcgggaccatccatcccgtgtgaaaagacactcatcctcttgtaggggggttgccccctaatctctgggaacccactccccacccagccaagcagagccagctctgagcccaccagatgctggagctgagtgtccacgccatccgtggcgtccagaggagaccagggctccaggaacctaagcaggtgtgagggcagaggggaggtgtgtgcagaggaagaaggggaggggagggcttggggtcaggaggaggacaaggttggccacagaggacagcagctgggacagggtccagggacctggggacaagctcgagggtcgagctgagactggggcagggcccaggtgacgtcctcacctttcaccagcagctccaggtagtcactctgctcagaccatttagggggcttataatagatgcagcgataaagcccggcatttccttctcttactgagtcaatgcggaatctggcctctgactcagatggactagcttgagacacatcttcagtatcattgtatgtggatctactgtccctctccaggcggaatgtttgaaccccaaccgggccccggcacacgaaagtcacatggctccccagggggatcacggtgcctggctcagccgagatggagggtctgggcagatcttctaggagggaagcagagcaggatctcagcgtccactgtaggaagtcaccatgccacacacgtcattttagcatcacaattcagggattttagcaattttatagagttatgcagccatgaccacagcccaaccttagaacattcccacgcctcctgcaccttctacgtgcatgtgattctcatcactgcagagttttttcccagttgacagtgaggaccctgagacttgctcacaacttgggccttgctcagggtcatgtgggaagtgtcggagcagcctggagcccttcatgcctgctgcagagcccagggccactttccagagggacagagtgtgggagggaggcacaggatggggatgacagggtcattggtgaaggacaagggacagagaagcgagggctctggagatggcttgtgctggggcctgaagggcactggccggtccccgggtgggactgagtgtgggacgggggttgccaggctcctttgagggtctggtggggtgagggtgaagcccccagccctgatctgctcacagcagatgcccagcccgtgacaggtccccattgctaatgcagatctctgtggagacaccacctctgggttttcctctatagtttctactttcttctcagcctaatttgcatttccttcttattaaggctcttgaaaaaccccatttatctcaactgggcttggggtggaggaggaagggcgggtttgacgccctgaaacaggaaggttgtgtcaaaattagcaaaatccctgagcggggcagagagctggcagggcttcaattcactcgtcccgtcttcattcattccttattattgacaaattaaaactgcatgtatttaaggtgtacaacatgatgttttgatacaggtatacactgtggaatcgctgaatcaagctaattaatataacctcactttgcgtagttaattgttgtggtgagaacatttaaaatctgccctcttagtgattttcaagcatatgatacattgtgattaactctagtcattgtgttgcacaatcctgaacttactcttcctgtctagacgaaattttctatcctttgaccagcatctccccaaacccacccatttgttcatttttctttcttttaaccatatctcagttacttatcaatctgtttaaagacgtttttcatgggctgctaattccacaaatgtgagaaacacacacaggatgcctgccgtttggaggtggacttccagaagggaggaccggtattgatcaaagaattgtccaaatctgcagctgtgaactgacagagtcttgctctgtcacccaggatggagtgcagtggcgcgatctcagctcactgcaacctccgcctccaaggttcaagcaattctcctgcctcagcctcctgagtagctgggattacaggtgcactccaccacgcccagctaatttttgtatttttagtagagacggggtttcccccatgttgtccaggctggtctcaaacttctgacctcaagtgatccacccacctccgcctcccaaagtgctgggattacagatgtgagccaccgcacccagcctcattggtcatttttaaaatgaattattttttttcaaaatcagcatgtgagaagaaccaccatattgagcggcatatggagtgtttgagaaagcgaaagaacctggaggaatgtagagatgagtgagccccaggtcacagggacaggatgtggctgggaaaatgggcatgtccagaccaaagagaggtgcacaggtctgattctatctgaagataaacaggggaagggctctgagaaaaaaaaaaaaagatttcatcttacgatgagatattaaatgaaaatttttgaatacaatttaaaaactgtggaaagtacaatggtcatggttgtgcttttgcaaatcgccagtccctggggtcaggaagggagcaggcagcagtggcatggacaggctgaggccggcctcggggagccacggaggggagaggggctgtcacctgggggtgatgcaggaaaagtcgatgaagagagagggaaagatgagaaaaatttagagtgaaatcaccaggactgggtgacatggtgcatccaggaggatggagaagaggatgagtgttcagagtctgccctttgtgactgtcatgttccccgccaagaagctgccgagtgaagtgtgggctcgtctggggaaaagtgccgggctcagccttggttgtgttgggtttgaattctcattgtggaaatcggtgtgcggagctgacgcctgcactcccagggtgaccgcagcactactcacagccgccaagacctggcaagaacctgagtgcccaccgccaaatgaatggatgaggagaatgtgctgtgtatatgcaatggaatattattcagccctaaaaaaggaaggacattctgtcattcgcaacaacatggatgaaccagaggacgttaggctaagtgaaataagccgggcacagaaagacaattactgcgcgttctcacttatctgtggaatctaagaaaagttgatcacccggaagcagagtagaatggtggttattggaggctgcaggtgcggggcatgggagagacactgatcaaatgatacaaagtttcgagtagccaggacgagtgaatttttcagatctatggcacagcagaatgacagtagttcataataatttattgtatatttcaaaattgctaaaaggagatttaaaatattctcatcacaataagtatgtgatggggctgatatgttaatcagctttatttaatctttccacaatgtgtacatacgtcataatatcacactgtaccccgcaaattgcaattatttgtcaattaaaaataaaatttttgaaaataagaaaagcaaaataagacaggtggaggatgcgagagagaactgggtgagggttggttatgcattttacatttggaagagtttgcaatctagggtatatttaaagggatctctccaggccctctaagaatcaacatcactcccacccagcactgcccttggggtgacagaggggactgggaagatgggacgaaggcatgacttaccctcctgcgtgtggatggtctgggccaggcagagcactggaagagaagccccagtgagaaaaatgcccagtgcccagtctccttacggggctgctgtcaaaagggggctcgatggagctggggggcattcagcatttcataacgaccaagccaaccctcctcgacatcactgtctccatgtaatccttcttgctgcaaaatggtttcaagataaatcccaaagtctcctcctccaaaaaggctcctgctcccccagcccttcttaaagctgacctcatccccacacccgggcccctgtttttaggacaagatcttctctgatcagacttaggccccagggagagcagcagggcagtcttgggaggaggaggacactttcctccccagaatcttctggactagagtcaggcttgagcagggaattttccagacctcccgaccccctttccagcctcccggctgcctccaggactcacctaggcccaggagggcggtggggtggggagacatggcccaggtcccagcagtgcagcctggcctgaggcgcaccaatgcaaggacagaactctgcagcagacacaagcagacaggatgtgctgcccgggggcctcctgcctatggggcttccacagcaactgcctcacacaagaggaagagctttctgtcctgttctttccacccttcccactagtgagacgagagggagggccttggtttctgaaaaatgtcgcttaccctaaatgtcgcttagaggcagatgaccgtaaactagttaccagatgtgtcagcctctttctaaatctatgggacaaggcagaataaaggtcgggcaaccaattgacttggacgccgtcccaactccacaagttaacggtcgcagctcttgggcaagacgttacaaaactagaagctgacatttccttgtattacaaatgggagccatagaaatccttccccaagtttttaatattgtgatctatgctaaaatcccgacaaggtatttaacacgttaaaaatatcctacaaagcatattatttttttaaggagactattggtgaggatgtggagaaactggatccctcgcataccacagtaggaattaaaaattgggcaatcactatagagaacagtggggaggttcctcaaaaaattaaaaatagagctaccatatggtccagcaatcccacttctgggtctgtatttaaaagaaacaggccaggcgcagtggctcacagctgtaatcccagcacttcgggaggccggggtgggtggatcacctgaggccataaattcgagaccagcctggccaacatagtgaaaccctgtctctactaaaaatacaaaaaattagctgggtgtggtggtgggcacagctacttggaaggttgaggcaggagaatcgcttgaacccagaaggcaggggttgcagtgagctgagattgcaccattgccctccagcctgggcaacaacagcaagactctgtctaaaaaaaaaaaaaaaatcagtatgtcaaagagccgtctgaactcccctgatcactgcagcactattcgcaatagctaagacgtgaaaaccatctaaatgtccattgatagaataattgatatagaaaatgtggtgcacacacaggggaatactattcagccttaaacaaggaagaaaattctgccatgggcgacaacacggacgaaacctgaggacatcacgccaagcgacgcagaggcagagaccaagtactgcatgatgtcacttacaggagatctgcaaagtcaccagagtcacaacatcacagcagggaatggtggttacgggggctgggaggagggggaaatggggagttattaacaaacaggcctagagatctgctgcaccacatacgacccatcgtcagcaataacgtcttgttcacttgaaatttgttaacggaatagacctcatgttatttggagggcccggaggaagacaggaagagaagggaatgtttgaaacttcttagagatggattaaatggttgtgaccaaaatgctgatagtgatgtgaacagcgaagtccaggctgacaaggtctcagctggaaataaggatcttacttggaactagagcgaaagccacctttgttacgccttagcaaacaacgtggctgcattctgtccatgccctagagataccacgccagggtgtctggcggaagaaatttcttttctttttttttaaacggagtctcgctctgttgcccaggctggagtgaagcagtgcgatctcggctccctgcaacctctgcctcccagattcaagccattctcctgcctcagcctcccgattagctgggactacaggcacccaccac[179 bp omitted]aagtggcatggcttcttgtaccaacctaggctcagatgtgggagcaaagaaattacctaaaggtagagtttatatttaaaagagaagcaaagtgtaaaagttcgaaaaatttgcggactagccacatggtagaaaagaaaagtccgttttcaggggaggaattcaagtaggctgctgggcaacgacttgctggagaaatttgcataactaagagggagtcacgtgctgtaccaaaacatctcatctaccccataaatatatacacctactatgtatacacaaaaattaaaaatttaaaaacatatatagtgacatgagatgtagtgtgaaatgtcattaaaagatgagtttgcatcagaatagtccaaacgtttcaaaaacattccagcatgatcactgccttgctgaccagtcttcctcctgagacgtggtgacagtaatgatcacaaacttggatctcgtggacagacaggggaattcaagctaaaccctggtcctcaaagagttctgcatgttacagtccctggtatatccttccaatctaatccaattttctgtgagtccataagacagcaatccatctaaaaaataacaataaaccaactaaaactgcttaatataatatgttaaagattttttaggccgggtgcaatggct[168 bp omitted]gaggcaggagaatggtgggaacccgggaggcggaggctgcagtgagccgagatcgtgccattgcactccag[145 bp omitted]cccgggttcacgccattctcctgcctc[224 bp omitted]gctatgcagtcaaaagttaaagaaagatggagtccccagcctcaagctgaatactgaacctggagctcaccttgatgatgatgaattaactgagctttattttcatggttttgtaaatcatgaggacaaggataaagtgcaggggtacagattccaaaagcttccacctcatcataagaatgatttcaaatcactcaccaacttctcatggttgcaaggaatactacatttgttttgaaacttagcattgaacatgaggccaaaacacagtggctcctgagaatgactttcctgcttctgactcttcttttactggcataatggtttctatgcattagattatcctccctgcctcttttcactttaggtcttcattagtgatttttattcagctttatcaaaggatcctttgcacacaaactgcatccacttaatctgtgcaattcagtgaattctgacagctgtgaaaccaccaacatatccaagattttcttcactgctcagaagattcctcatgctcctttgcctccatgtggccactggttcctttttgatatgtatttgttgactgatttatttatttatttatttatttatatatttattttgagactgagtttcactcttgttgcccaggctggagtgtaatggtgcaatcttggctcccgggttcaagcgattctcctgtctcggcctcctgagtagctgggattacaggtgcgcaccaccatgcccagctaattttgtatttttagtagagacggggtttctccatgttggtcaagctggtctcgaactcccgacctcaggtgatccgcccaccttggcatcccaaagtgctgagattacaggcgtgagccactgcacccggccgactaattcattttttaaacacacttcttacctgggaataaatttaaacttgcaaaagagttgcagaggtacagagagttcccatatgcccttcatccaggtccctctaatgttcatgctttacacgaccccagcacatccgccaaaaaaaaaaaaaaattaacactggtacaataattaactgacaggctttctttggatttcatcatctttccactaacgttctttgcctgtgctgggatccaatgcaggggcaccgtcctgcatttacttccctctctgttaactgcagagaagggtttctgttttcctggttggaccctgattaatattcccctagtatctgaactccaggtgcccaggaaggttggggggcaaggatgtgctgcccactggggaaggagtggctggcagaatcgacatccgtctgttcctccacaatccaaggtcacagaacacatgggcagttattctgggtttttccataagaagggtgatacagagctgtcgttgttccatattatgaggacccctccacctttgcattcctctaagacctttcctctgagactctcctccaagctggagaagacaagctacatgcttatgtccaaggcatgctgcagattcagcatggcacagctccctcactcaaaaacgttacttgatgtgggatgcacaggcatagagtagtgattctcacactagactcagatacatacacaatatttgcaacttaaattaaacaccaattaaatgtcaagtggaaagacaacatctacagaaataaaatgacacaagatgcaatgtgaaatgtcattaaaagaagagtttgcattagaatagttcaaatatttcaaaactattccagcacgtcactgcgttgctgacctatcttcctcctgagatgtggtcgccgtaatgatctcaagcttggacctcgtggacagactggggaactcaagctaaaccccggtcctcacagttcagcacgttgcaatcctgtgtcgttccgtccaatctaatccaatctcaaggaccccagttcctgagcaaccctggcttggctcggccaaagggaagcgtctacagaatctgagtctagaatgcccggaggtctgtacttcttgctgttttcaggagattcaactgcaaagccctccccaagtcatccacattggctcacgtttctgtgccccacccttcctgcctgggaggacccttcttgttcagccaaaaaagcaacctgagggtggtgtggtagcagggactcacccatttctctttccatcttctgtcgcggatgcaaccctggaaggaagacctcaggacgatgatcatcttcataggattcccgacctgtgcctggctttgtcctgaatattagccttggcagcctggcctgggctccgatggtggatgaacttggctttccacgggctgccacctccagcctgcgctgtggagagaccaggtcctcggaacagtattttaaccttgtcctcctttcccttccagggtttaccaagacatagcgggtgtcatagatgtgaaaaagcttctgctataccagggtcaggaacggagcaaaactgaaaaccgcacaggatgtggtctgccaggtgccagcatcacagctcaaatccttaagaagctccagccgcaggcacggaaataaacagcttctccctgccctgtatacgtctccgattttacccaggatggggctgaggaagcaacacagattcccaaacgttacttttttttttttattttgcttgagagccaaggcaatattagacaagccttactccctaattagtgcctgacaagaaccatatctctgtcccaatccttctattcaaagtaggcacaatttgcttttaccaaatgtaaaactcatgtcaaagccatgctgtgagtatttacaccagagaaatcggcaaatgctacacgtcggggttgttttttgtttttctttttgctttttttttcagagagctgattgtcaagactttaccagcacactgctggtaaatttccaaaggccaatttaaagaaatttttttaacagaacatgtaaaaaaaaatcaacgtgaagtcaacatgctccagggaaatcagacaattgataaagcatgtctatttctgtagtgtatactccagcctgtttccccctcctacctcaggtaccgtaaccagcatctgaagtcttatattcaaatttcccttgcacttttgtaaatatagtgttctctcatcgatgtacctatttggtgtgtatgtatatgtgtgtgtatatatatatatgctatcatttaaaaattgtatttatttatttaaggtgggtcaccgaggctggagtgcaatggtgcaatctcagctcactgcagcctccacttcccaggctccagcgatcctcctgcctcagccttctgagtagctgggattataagggtgtgaccccatacccagctaatttttgtatgtttagtagagatggggtttcgccatgttgaccaggctggtcttgaactcctgccctcaggtgatctgcccgcctcagcctcccaaagtgctggaattacaggcatgagctactgtgcccagcctcgtttttaattttagtgcaaagtatagttttcaaaacaatgtttgcaatgtcatcaaatatagaatgagcacgcatcaatgtcttcttaattcattaatgatgaaatcatcattcaaaattcctgtctttacccaaatatttagcttcttctgttgctcttcatttgttcctgcgtttctccatttccactgggatgatttcctcttgtccaagccttttattctggcaaccaatgaactttacactctttctatagttttgccttttccagaatgtcacatagttggaatcagacagtggatacgccatttgggcgggcttatttcgtgtagtgatatacattgaactctcctccacatcttttcatgacttgagagcttgtgtcttcttagcatgggataatattccattgtctggacacatagttaatccactcacttactgaagggcatcttggttgcttccaagtttgggcgattatgaataaagctactgtaaagatccatatgaccgtatgttttcagctcccttcggtaaatatcaaggaatgcaattgctggattacatggcaaagctatatttagttttagaagaaattgccgcactgtctcccaaagtggctgtaccatttggcaatcccaccagcaatgaatgagagttcccgttgctccacatcctcgccagtaggccagtatgtggtattgtctgcgttttagaatttggccactctaataggtgtgtcgtggtaacttggttcctaagatactgatagaggtgcagaacaccagctgggaagtcagccagaatgagcttctcctgtgacttcctgtcccacagcctcagagaactttgacaagccacttcccctataaacttgtctttctttctttctttttttttttttttttgagatgaagtctcactctgtcacccaggctggagtgcaatggcatgatcttggctcactgcaacctccgcctcccgggttcaagtgattctcatgcctcagcctcgtgagtaactgggattacaggcatgcaccaccacacccagataattttgtatttttagtacagacggggtttcaccatgctgaccaggctggtctcggactcctgacctcgtgatctgcccacctcagccttttaaagtgctgggattataggtgtaagccactgagcccggcctccttataaacttctctaaatctaaatttgtgaatattctttctttaaaagtcgatcaactggcctggcacagtggctcatgcctgtaataccagcattttggaaggtcgaggcggatggatcacttgaggtcaggagttcgagtccagcctggccaacctggtgaaaccccatctctactaaaaatacaaaattagaggggcatagtggcgggcgcctgtaatcccagctgcttgggaggctgagaggcaggagaattgcttgaacccaggaggtagaggttgcagtgagccgaaatcgcaccactgcactccagcctgggcaacaggagcg[138 bp omitted]ggtgaaaccccatctctactaaaaaaatacaaaaagttagctgggcgtggtggcgggcacctgtagtcccagctacttgggaggctgaggcaggaaaatggcatgaacccgggaggcggagcttgcagtgagccgagatcgcgccactgcactccagccagggtgacagagcgagactccgtctcaaaaataaataaataaataaaataaataagtcgatagaccaatatttatcaattacctcttatacgcttggtgtttgagattcaggaatgaacaaaacagatccagtccctgccctcaacctagctcttagtgtaatgattatgggaacagggtcaaatagcaaatcacaaattatttcacgactattgtgagacaagagtgagagccaagagtggtggtgcacacctgtaatcccagctcgaaccagggagacagaggttgcagtgagccgagatcgcaccaatggcttaacacaatgggatttggcttttcactcatgtaaatgaccagtgcggttttctctggggcagaatttgaattttctccccaggatgactcagggacacccgcttcctccattgtgctcccatcatgcccttgggcaatggcgtcccgtacttcaaacagcaagaaagaaggagaaacagaatatatctgtgcacttgcaaaatttgctgacacatgtcatttctgtccagaattgttggctataaatagtgttatgaacagtcacacaatgatgcaacaagaccagggaaaaagtcccttggtgggggtagccacttcccagaggttccaatgcttgcactgtaagggtaagtacagaattttttttttttctggtgagcagccacatatttctgcctcacgtgaaaaataatctcaagaagaaatgtacctgagaatgtatagcccaggagcatgatgttgtgacacctgattgatggaccatgtggggtgattgactcccctgtacttagaaggaaatcaaaaccaaaggttcaagtaatattaaagagaaacattgtcatattccctctggaacccatgcacgtcttagctaacctgcagagaggagtagaaaccactagaactgaaggaggcagctctgtgcaagggtgacggccttctcccctcccagttcccttagttctggagttcgatgaaggacggggtccacacggcccactccgtttcctctttctctgaaccgggggtgcagaacctgaacccagacaacccctgggtatgagtccggccccagatcacagctgtggttttggctgccgcagtgaccttggcaaagtcctgagtcgtttgctgttgtgggtatgatggacagctgcgacgttttcctggactcccactgaaatctttaacttcaagatcatcttctccatcccaacagaactcatcaggcccagaaggctcccagccccagaggttcccagagctcttcaggtggaatgttgagtctgcacaagccaggatggtgactctggagaagttctccagaaaagaatcagcatctagagtctcctgagttccaggcccttagaaatttagactccagaaccactgccaaagtgaccccctcagcccagcccttcggtacccagcatccactgtcctcagcccagcccttccgtacccagcatccactgtcctggtgggagtccgctgtgctgctccaagaagacagaccctcaccattaccggaaagactgaccctcctgtgtccaggtcctgtggcccagactcagctctggaagagaaatctggatttacaatgctcagtacgtcgctcaaaatctgcactcgatgacgtctgtaagctcttggtcccagcctgggctgcgaagcctgaggcttgggcagacaatgccgtcccgccgtcatctctgctccctcttcgatcgctaagctcccacagcattgatctaaccagacatgggcccagggagagagctgtcttccccacctcccagccccaatccctcaatccctcgcctgccgtgccaagactggtcaagggaaagtccaggaagaaagcatggtaaggggcaccgtgctgcctgcgcccgccccgctgtgcagaatgcagaggctcaggatgcggtgcgcagagactcagtcccaaccgtcttgtggcttcttaccacgtatctcccaggaagtcaccatgaggcttagttcttccttcctgtgactggggtaaaggagagaactgtctccttggacatcatcatccatacgcccggcccgaacgtcatctctgacccaaacaccaaatccagacgggcaaccacggctgtggggtgtggagggggaatctgaacaccaacctggaggtcagacttgaaggagacggcgacgctgccttcgccccattcacaatatacaaccttcgatgggccacctccccagtgaggcttcatcaagggggcttggtcaacttcctttttgtgtgaacgaaaacatacgtttccaggcgcctattaagggcttgagtctgtgtcagagacgagccacacaagtcaacggacctcacagtctaatgtggagggcacacctctgactattcaaaagtcatatatagcatattaaccgtagattttaacaaattagccttgaaatacctgcagtttgtcacaatggaaggctcacttctcactgggtgacacgtccatatgggggcccccggttggcagttggagctcctccatcaggtgactcaggtgcccagattcttccaactttggggtccaacctcccctagaaccttggagtgctctgttaccagtgaggggaaagaggaagagagagtggaa[221 bp omitted]ggtgaaaccccatctctactaaaaatacaaaaaaattagccgggcatggtggcgggcacctgtagtcccagctacttgggaggctgaggcaggagaatggcgtgaacctgggaggcggagcttgcagtgagccaagatcgtgccactgcactccagcctggacgacagagcgagactccatctcaaaaaaaaaaaaaaaaaaagaggtggagaccatcctggccaacatggtgaaaccccgtctctgctaaaaatacaaaactaagctgggtgtggtggtgcacacctgtagtcccagctacttggaaggctgaggcatgagaatcacttgaacctgggagacagaggttgtagtgagccgagatcgagccactgcaccccagcctggggacagagcaagactccgtctcagaaaaaaaaaaaaatcctacgaccttgtgtgaaaaggggactcaaccctcagagctaactccagggaagccacctgcagtgtggagtggaattggggctgaggactgacgagctggcgacaggaagagcagctgggggagacgtggacggaggagacagcttctgtgaaagccctaatcaggagacaatttttcctgttgtaagttgagtggactccagatggaaaaataatacgaagaatatgtgtactgattgagcaggagtctctaaaaggccaaataaagttttggtattttaccctcaagagagtgggacaggttttgagcataagtatggcatcatcatatttttgtctaaaatgtatctgtaagaccacttcctgaagtcagaattgcacgaagcaaaaacagtaagaggtaacgttttctgagcatttactttatgccagacactgccctgagtccccagtatggatagtttacttaattttcccaacaactttggaaaggtgttttcatcactagactcattttaatgatgagaacactgaactcagaggttaattagtttgattagtgtcatgtattaacatgcataatttcatggaaggaactggatttcaacccaggaagaaagtatgtccttacctattattattattattattattattattattattattattattattgagacagagtcttgctctgtcacccaggctggagttcagtggcatgatctcggctcactgcaacctccgcctcccaggttcaagcaattctccttgtctcagcctcctgagtagctgggactacaggcgcccaccaccacgcctggctaacttttgtatttttagtagagacgaggtttcaccatgttgaccaggctgatctgcatctcctgacctcatgatccacccacctcggcctcccaaaatgctggaattacaggcgtgagccaccgcacccggccgtccttacctattattgatatatcattgtatttcttaaagaaaacaagaaaaaccaagtgtggatagaccagttaaaaagttcttgccttccaggacagtgatgatttgtttgcactggaattatcacagcaggaatttcagtaaatatgtggatttatgactgggaggtaggctcagaagaaatgctgatggaagtttggcttccagaaatatctgactaggttgttttagactaaacttctcaccgttaattaaaaaaaaaaaaaaaaaaaactttaggccaggcgcggtggctcacgcctgtaatcccatcaccttgggaggccgaggcaggcagatcatgaggtcaagagatcgagaccatcctggccaacatggtgaaaccccttctctactaaaaatacaaaaattagccaggcgtgttggtgggttcctgtagtcccagctaccctggaggctgaggcaggagaatcgcttgaacccgggaggtggagattgtagtgagccgagatcgcgccactgcactccagcctgggcaacagagtgagactccgtctcaaaaacaaaaaaaaaacaaaaaaaacaacaacaactgtaaaagatgaacaaaaaccaaagaacatctgtctgtagaacttggcatgcttccaaggcagagagaatttagggttccaagacataaaagaggaaggaaaccaagcaaggggactttatcctttgaggttagttttatgttaacggtttgctgattctgaaactaaaggcagcagatgagagaccaaaaagctgagtaggagcaggatgaagaatttcaacaaagaactagcaaatataagaacaaacacagccggacgcggtggctcacacctgtaatcccaatactttgggaggccaaggcgggtggatcacctgagcttgggggtttgagatcagcctgaccaacagggagaaaccccatctctactaaaaatacaaaattagccggactcagtggcgcatgcctgtaatcccagctactcaggaggctgaggcgggagaatcgcttgaacccaggaggcggaggttgcagtgaaccgagatggtgccactacactccagcctgggtgacagagtgagattccatctcaaaaaagaaaaagaaaaaaaaagaaaatacgggacatggtgaaaatacttaacatatgtacaactggaatcccataaggggaagaaagacagagaaagagaaaggcagacacgatattggaagggttactgaacaatatttcctaaaatgaatcaaaaacatcaagccacacagtagatgtccagtaggaacttaaacctcacgtgtttataacatgttataatataagttgcttatattcactcccaaatctcctcctcctaaggtctttcccatctcagtaaatgagaattccagccactagttatttgggcaaaaaaaaaaaataagtgttacccttgactccatgtttttcctcatatcccacagctgtgagtacattatcagacatttccctttgaaatatctccagaatagtatcatttctctccacctcttggagaccacccgagcctgaaccactgtctgctgtacctggatcattgcaagagcttcctaactaatccttcttgcatctaacattcctcctctattaatctgttctccacacagtagcagagttgtcttgtaagaagataacgattctcccaaggatcacagccaatcagacacagcaatggctgctccaagccacagggatgcctgctcatgcaccgtgccagccaagctcgtttctggagttttgggtgggtccggatgagagaagacaatagctaactttatggctgtcattctgggaaatcattcccttgagaacagagctttgtcaaaagaaggtggattctacaaaagattaagcagtaaatgactcaaaagatgatcaggcaatgggggaaaattagccaagagctgattcctatgaaatgttttattattcctgtgaaatttttgcattaatcaagaccatgaatttggaaggagcccttcttggagaagacctcttcattggaagcaatggtccctgtacaggtggctgagaggaacacaacaaaagcaacgtccaggtagagcaggaaggatgcccctcaggagcaaggagtggtcatcaggtgaaacccaaggtgtcttcttagagagtgaaggtcccgggtacctgccgccaggtcctagtgaccagcccccagagtggaagtacaagggtaatgcccagctactcacaccggggggtgatgtcctggagaaagggctgacagcagcttacctggactgctggcatcattatcacatgcatgccacatgccttcatgaaaatcaaagtctccctccaaagtgcaagtccaattccataaaataaggcatgctgatcataaaatacgatttggcaataaaatggcagtatagcaaaagcactggccactttgtgtcactccttagtatggtttggatctgtgtccccaccaaatctcatgtcgaattgtcatctccagtgttggaggtggggactggtgggaggtgattggctcatgggggtggctcctgcatgaatggtggggactggtgggaggtgactggctcatgggggtggctcctgcatgaatggtggggactggtgggaggtgattggctcatgggggtggctcctgcgtgaatggtggggactggtgggaggtgattggctcatgggggtggctcctgcgtgaatggtggggactggtgggaggtgactggctcatgggggtggctccggtatgaatggtggggactggtgggaggtgattggctcatgggggtggctccagcatgaatggtttgtcaccatccccttcggtgctgttctcacgatagtgagtgagtcctcattagatgtggttgtttaaaagtgtatggcacctctcttctctctctctctctccctcctgctccagccatgtaaagtgtttgctcctcctttgccttccaccatgactgaaagcctcctgaggcctccccagaagccaagcagaagccactgtgcttcctgtacagcttgcagaaccatgagccaattaaacttcttttctttgtaagtttcccagtgccaggtatttctttacagcaatacaagaacggactaatacagaaaattggcacccaggatggactaatacactcttatgcccaaaagcgttccagaacttcccaccaaggtcatattgacaagactttgcatcttctctcccccacccacctcttggcttagcactctgattgtatctcctcccactttccccttcgtgaccctgatccagccacatggacatccttgctgttcctagaatacaccaagcatgcatctgcctcaggacctttgcatgtgccatgctttctgcctggaacactcttcccccagagatgcatggggctcactctctgcctccttcactcttgactccaatattcccttctccttcaggtcttcttggaccatcctatctaaagttgcaacactccctccagatttcatatcacctctcactgcctttttttctttcttcagcatatatcactaatcttgcatatattttatttattaatattgtttatgatctgcccccccattagaatatatctccatgaagtcatagatgttttttctgcagtgtttcctatagtgtccctgcacctaggacagtccctggcacacaatagatactcaataaatttttttgaatgaatatttgttgagtatctaaaatctctaaacttatgaatgaatagacatatacagtatataggaagtataaggaaggctacaagggcatgattactgagtacaattctagaagccagatctctagcttttaattatggttgtaccagttataagctttgtgactttagagtaagtttattaacct[146 bp omitted]cccgtctgtactaaaaatacaaaaaattagccgggcgtggttgcgcaagcctgtagttccagctactcgggaggc[137 bp omitted]cagaactcataaaatttttgtgactattcggtgagttattatgttaaaagtaatcagataggctgaggcaggagaatcgcttgaacccgggaggcagaggttgcagtgagctgagatcacgccactgcactccagcctgggtgacagagcaagactccgtcaaaaaaaaaaaaaaaaaaaaaaaattacgtaacggatacaatgtatgtcactgggttagtggatccctgaaagccctaacttcatcattctggaatctatccatgcaacaaagttacactcgtaccccataaacgtatacaaataaaaaataatcggctgcgcatggtggtttacagctgtaatcccagcactttgggaggctgaggagggcggatcacctgaggtcgggggtttgagaccagcctgaccaacagggagaaaccctgcctctactaaaaatacaaaattagctgggcgtggtagcacatgcctgtaatcccagctactcaggaggctgaggcaggagaatcgcttgaacccgggaggcagaggttgcagtgagcagagatcaaaccattgcactccagcctgggcaacgagagcaaaactccatctcaaaaaataatcataatcataatcataaatataaggcaaaagtaagcatgctttctttaaaaaaagtagtcagactgagcctgtcatctggtaagagctctaacgtttatcgttaatatgattgttattgtcgctgttatattttcattattggtgttgtcattatatgtacaaaacagcatcagcagagaatccacatccttttcaagaacaaatgaagcatttacaaaaattgatgacttattaatccacccaggaagtctcaaaatcttccaaaaacttcatataatacaaaccatgactgggcacagtggctcatgcctgtaatcccagcactttgggagaccgaggagggcggatcacctgaggtcaggagttcgagaccagcctggccaacatggcaaaaccccgtctctactaaaaacacaaaattagccgggcgtagtggtgcatgcctgtaatcccagctacttgggaggctgaggcaggagaattgcttgaactcgggaggtggaggttgcagtgagccgagattgtgccattgcgctccagcctgggcaacaagagcaaaacttcgtctcaaaaaaaaaaaaaaaaaaaaaaaaaaaaagaaaaaagaaaagaaaagaaaaagaaaagaaaaaaaagaaatacagaccatattctgtgactacaaatttatgtaaaagattaaatattaaaagatttaaaaatacatttttaaaactaaaaattcagtacaacttatgagttcagacttaaaaaacacaggagacataaaatatttagaaatgagcagagacagtgattcatatcgaaacttgctgaatgcaataaaagtcctacttaggggaaaatgtacactttttttttttttttagaaaacacgaagtttgggaaattacttactgagcatgcaacttgtggagctggaaggagaaaggaagtcaaggggaggtgcaggaagggtccagaaaagcagcaaacacaaggttaacagaagaaatgccccagtaagtgcccaaggaactcacccaggtgcattgtcacgacgctttcagaaacaaaagaaaaagaaaataaacatattctaggtgagagaaaacagacaactgtgcactaagtttctattttttttttttttttttttttttttttga[134 bp omitted]cac[184 bp omitted]tctggaagttgacaagggagaaatgcgtttgaaaatagcctgtggccgggtgcagtggctcacggctgtaatcccagcacgttgggaggccgaggcgggcagatcacaaggtcagtagttccagaccagcctggccagcatggtgaaaccctgtctctattaaaaatacaaaaaaattagccaggcatgtctgtagtcccagccactccagaagctgaggcaggagaactgcttgaacccgggaggtggaggttggagtgaactgagattgcaccactgtacttcagccc[223 bp omitted]gagg[138 bp omitted]gggagggagggagggagggaggaaggaaggaaggaatgaaggaaggaaggaaggaagaaaatagcctatgtattcctatggagagatcccagagtgtattcttagagattaaacgacatcaggatgtcatctgtattgtgccaagaattgggggaatcagaatatacattcatattgactcatattcacccagaaacaaacactggaaggattaatatgagaaagttaaaattgtggctctcccacgttttcttccccgtccaccacctgaacaagctgcggtcctagaaatcacctcgactgctcctctttctcaccctctccccttgttctacctccagaatctgtcctcatgcagacactgcttgccagcaccacggcgccaggttcaccctctctcccctcgtccagggaacattccctaagtggtgtctctgtgttcatttgctgcttcttagctgttctcctcattgtagccagggtgatgttttcaaagggtcagtcaaatcatgtctcgctaccattgaaatctccagtgattcatgatgtacttcgcccaaaacccaaactctgtgacctacgggacactcactcacctctccagtttcatgttggtccctgtgcccctcactccctgccctcaggccacatgacattcctgctgttccttgaagacaccaggtccctccctgccttgggactctgcgtctctgcctgggtgcaccgacctcctgctttgcaccacagcctccaggtctctgctcagcatcatcttagcaagaagggccttctcagatcactctgttgaaagaagtccactcccctgacacccatccctttgctaagaagatttgtcttcattctctcttgacgttcatcctcctttctaattatctactctttgacttgtacgctgtccctctctccccattagaatggagacttcacttggccagggaccttgtctgtcttgatcatcactctatcaccggtacttagggcctggcacataatagatgctcagcaaatacttgtagaacgaatagtgaatcagaaacaatattggccattgtttactggacatttaaaggttaaataatggcacccctatgcaatgaaatactggattagcattaaaaatgatgctgctggccgggcacggcggctcatgcctgtaatcccagcactttgggaggccaaggcgggcggatcacctgaggtcaggagtttgagaccagcctgaccaacaggatgaaacctcatctccactaaaaataaaaaaaatagcttggcatggtggcgcacacctgtaatcccagctactcaggaggccgaggcaggagaatcacttgagcctgggaggcggaggttgcagtgagctgagatcgtgccactgcactccgggctgccccacacagcgaaactctgtctcaaagaaaaaaaaaaaaaaaggatgatgttgttttacttttattgacatgaaagatgtcaagggtattgttgagtgaacaaaacaggaaaaacacatgtatgtagaagttacatacattaagttatatatgtacatttacacacatgtttatggaaggagagatttctgagaaagtgttaacagaaatgtttgctgtgattaacatgaggtaatgagggtttcaaattctc[136 bp omitted]ctgcctcggcctcccaagtagctgggaccacaggcgcccgccaccacgccaggctaattttttgtatttttagtagagatggggtttcaccgtgttgaccgggatggtctcaatctcctgaccttgtgatccaccagccttggcctcccaaaatgctgggattacaggcatgagccaccgcgcctggtccctggactttttttttttaaagaaagggtcctgctcttgtcacccaggctgaagtgcaggacgcgatcgtagctcactgcactctcaacctcgcagggctcaggtcaacctcccaactcagcctcccgagtagctgggacttcagaagcgtgccacgcacacccggctaatttttgtattttgtatctaactcctgggctcaagcgatccgcctgcctctgtctcccaaaatgcttggattacaggtgtgagccaccatgcctgggtgaatttttttttttttttgagatggagtttcactcttgttgcccaggctggagtgcaatggtgcaatctcggctcgccaccacctccgcctgccgggttcaagtgattctcctgcctcagcctcctgagtagctgggattagaggcatacgccaccacgcccagctaattttgtatttttagtagagacagggtttccccatgttggtcaggctggtctcaaactcccgacctcaggcgatctgcccacctcagcctcccaaagtgctgggattataggggtgagccaccgtgctggccgaatttttttacattaagcatgtgtcagtcgtaactaggaaaaacaaaattatttttgtttaagaagataaaataaaatggccacctatgaggagctgggagtacaggcttaggtggaaacagataaggtgtcaagacctccttctgtgactgaccccttcagattttctccctagagtttcagtcatgcaagatgaggaggtctcagagcctcctgtgcggtgtagtgccagcaggtaacaatacagtattgtgtgcttacacatttgctgagaagatagatcttttgttaagtgctcttatcatcacaaattgatatgtggccataaaaatagtatcaaacaataataatatacaaatagacgggaggaacctgtgagaggtggtggatgggtttatgtcgtaaactgtggtgttgacacacagggcatactcatctccaaactcatcaagtcgtatatgttaaatacatactgctttttatatgtcaattattcctcgatagagtaaggtttttttttttttgtaattgcaagtgtctgcagagagcttctataggtttgggggtccgggagactcccataggtgtgccccgtgagcctcagcacctagggtgtgtgtagtggctattctgcctttatctgtattaaattttttaaaaattattttcccaggcattccacgacgctcaacttttcacccaagttcaagttcctgtttttttcttcacagaagtcgattgtgggcgccagttcccacattgctctcatcctaagtagcagcaacttgcgggctgatgcctgtgtccagccctagaagagcctccgtacctagaagaaaacctcccctcctgggagtcacggcgcaaggctgggctcccatcctcgcagggaggggcggatgcacctgcccctgcagatctgcgcccagatctgtgttatccacacccacatctgcgtctgcaggaagaggctccgcagcaggcaacagcttccatctgcgagcctcatttaatccccacgaggatcctgtagagggttcctatgttcacctctgttttatatatagacgaggacgctggctctgggaggagtaaagccgtgcagcagtaactcccgtgcagcagtaactcccgtgcagcagtaactgcagccgtgcagagtaaactcccagcacagaacccggcctccccggttcagaaacaaaagtgagctccctcctccctgcttgcgggcgaaactctcgctgcctgttgaacgtctccacctggatgccacggcttccccagactcccagtgcccccgggcaacgccttcctctctccccacctttccaaattttctctgcagcaagtttccctcctccaagtttctcccccttctccagccttcacgttcagtcccgtgtctctgtgccgtacaggactcagctgccataacagcagctggcgtctcagcgcccccggaagctgagactttccaggacaagaactgctttggagtcctctcgggccccagcacgacctgctacactgcaaactactgcaaagaacctttcaagactggagagatggagcaccccaagtctgttttacagatggaaaggtggtggctcaaagacgagataccacaataacagtggctatgaagctctcgctttgtcaagatacagttcaaagcactgggcatgcactgactcatctcacgacccctaaaacactcacgttggatactattgctactcctcttaccaacgcagaaacagcgtcacagcaaagttaagcagcttgcccaaagatcctccgctaggaagggaagaaggtggcctttgaacttgagctccccatccacagtctgcagtccttcagactggagcacattgtagaaattaacaatgtcatcccaacaacccttataaaacacttttgggccgggcgcggtggctcacgcctgtcatcccagcacttcggaaggccgaggcaggtggatcacctgaggtgagttcgagaccagccttaccaacaaggtgaaaccctgtccctactaaaaatacaaaaattagccgggcgtggtggctggcgcctgtagtcccagctactcgggaggctaaggcaggagaattccttgaacccgcgaggtggaggttgcagtgagccgagatcgtgccactgcactccagcctgggcgatggagcgagactccatctcaaaaacaaaacaaaacaaaacaaaaaacacttttgagttctgactttatttcttgctgttttcttatttttcatggaactcatcttaatgatttcacgtttaccaatcacgtatatttggacgtgattacagggccacagggcaacctccagaagcatgattcctttcctaagaatgaggaaggatgtggtcagtgtgttcctaaaattatgatactgctttgtaagataacatgttttgttcgttttatttcatctttttattttgaaacagagtctcactctgtcacccagcctggagtgcagtggagcaatctcaattcactgcagcctctgcctcctgggctcaagccatcctctcaccttggccccccaagtagctgggactataggcacacatcaccatacccagttaatttttgtattttttgtagagctagggtttcaccatgttg[133 bp omitted]tatgaagtgtttctctctttatttagatctttaatttccctcagcaatcttttgtagttcttagtgtacacatcttgcatttctttattaaattggtttctattcattttattatttttgaggctttgtaaataaaattgctctcctaatttcattattgaattatttttgtcagtatatagacatatgattgattttagtgaatatgtcttcatcgtgctaggatttttgttgttgttgctgctgttgttgttattgttgagacagagtttcgctcttgttgcccaggctggagtgcaatggcgcaatctcggctcactgcaacctccacctcccgagttcaagcaattctcctgcctca[134 bp omitted]cagtctcccaaaatgctgggattacaggcatgagccaccacatccggctcttgctagaaatttattgtacttttcagcttcataatttccatttagttttatgctttaataatatcccaaggtaacattatggtcactttctgtaactaatatttcttactctgttgatttatcaggggctggattactctccttcaagtttcctgtgctagcctaatggtttggatgttgttgttcaatgcaattctcctttatttttgttccatttatttttagcagctttgtttagctataattgttctactaaaaaaccttctcacttaatgtacacaatcagatgaatttggacacatgcaataaccccttggaagacattcacgtgcatgcgttgttggtttttccgcttcttacgggaactcctttcaggcatttccatctccacgctacacatggggaaatagaggctcacagaggagaaaggacgtggttcaggtcacacctgtccctggtcctccaggctgaggagcagagagaccacccaccttagtgctggaagggtttaacacatagcttgggctccctcttgtggccacagtggagaaactccctgcttagttcatttttattttttccatctggcattcatttttttcattcagtaagtatttgttggtcctgtcctgtgtgccagacactgtttgaggctctagaggtccaccaatatagaaaacaaacaccctttccatggaagagcttatattcttgcagaaggagaggggcagtaacccacaggcattatacagtcacagtcagctagaaggtgagagtgatttggataaatgagaaagtgcagcggtggtccagggggtctggagggtgcaaagctcagcagggggaatagtgtggcagttgcagacagaggggtaggaagagggaagtggcaggaagagaatgcagaggggtgagggttggggccacaggtcctgtgtagagccctgttggtcaccatgatcaccctgagtgagctgggaagtaacacaaatgactccaaatagaagcgccttcatggagccttcttcttcccagacttcaactagaaacctgagctgcctgtcacagcaggggacgtgtcatcccattagacttcaaacgtcctcagcaattccctgcccccttctttctaggagtcaggattcctcagccttgctctagaactgcatctggtgacccctagaaacctgtcctggaagccttacaaggctcttcacactcacagtttgtgatatgaccccagagttgtgcagtgcacaacctacacagctggacacgatgggcctggcactcttcctctgtgctcccactgcactctgtgctgactatgtcattccactgggtggtgccatgtcaacttctctcctctcctctcaatatcctgtaaggataagataggatcaaagttctacccacgtccctggtactcagaagaggagctgaaacattggcgaccactcattagcactctacttaacaaaacaaattgcccaggtagttatgattagatttctataaaaggctgaataattacagaaaggctctagaaactagtgtataattatgtacaggcgctggcagtgtgtagagtcatggaaatcagctaaggaatcgcggtgcagtctcaggaaccagctggataattgcaccaggagctcccaaaaccagctggataattatagtggagtccctggaactcagcgggtaattaccatgtactcatggaatcagcagtaataatagaagggtcccaaatgcagacactagggaaagtctggagacacttttgattgtcacaacccagaggagagggggatgcttctgggtggtggggggtggaggcgggggatgcacaggacagctcctcccccaaggaataacctagccccgaaagtcaacagtgttacccagaaaaaaacagggttcctttgcctggtgaggagcaaacaactctcccgagaatgcaggtgatgtggtttggctctgtgtccccacccaaatctcacctggtattgtaatgatccccacgtgtcgatggggggcagtgactcacgcctgtaatccaagcactttgggaggttgaggcaggcagatcatgaggtcagaagatcgagaccatcctggataacacagtgaaacccgtctctactaaaaatacaaaaaattagccgagcgtggtggcgggcagctgtagtcccagctactcgggaggctgaggcaggagaattacttgaacctgggaggtggaggttgcagtgagctgagatcacgccgttgcactccagcctgggtgacagagcgagactccgtctcaaaataataataataataatccccacgtgtcatgggagggacctgtgggaggcgactgaatcacgggagcaggtttttcccattctgttctcgtgatagtgaataagtctcacgagatctgatggttttataaatgggagcgcccctgcacgctctttcttgcctgctgccatgtaagacgtgactttgctcctccttcatcttccgccatgattgttagccctccccagccaagtggaactatgagcccattaaacttctttcctttgtaaatgaaccagtctcgggtatgtctttattagcagcatgagaacaaactaatacagaggttttgatcaagaagagttttatgacttgacacagctaaggaaggcactgggtgtattcttcaaagcagtgtctccctgaggaaaagggacaggagggctctatggggtgagggagcagggagagggcgcgtcgttgtatgtggaggagggtcccagtcacgcagatgcagcgagtcgtcataccagcacacgggtcgcatgttacggtaacgagactacagctcctcccgggatggagacttgagcgcagcagtgcagaaagttcactcgggttcatctctaagttgccagggcccgtcagaggctggttccaaccaacgagtggccgcattccacacagggtttggagaaaaacaggctgcagggcagaaggctgtgaaacaggctgattgctcaagttgattaaattcctataatccctggagaccctccctgtctccatacagta[184 bp omitted]gtggtggcgggcgcctgcagtcccagctactggggaggctgaggcaggagaatggtgtgaacccgggaggtggagcttgcagtgagctgagatcgcgccactgcaccccagcctgggcgacagagcgagactccgtctcaaaaaaaataaaataaaataagaataagaagaagaaagaagaaagaagaagaagaggaagaggaagaggaagaagaggaagaggaggaagaggaagaaaaatgttttaaaaagactatttttagagcaggttcaggttcatagtaaaatgaggggaaggtagagattttccatgtactccctacgccgacacctacatagcttcccccattaccagcgttccctaccagagcggtatttttattacaactgatgagcctgcattgacacattgtaatcacccaaagtcatattagggctcgctcagtcttcctgttgcacatcctatgagttcaggcaaatgtctaatggcaggcacccaccgtcacagtgttagacagaggagagccattgccctaaaattcctctgtgcaccacctattcatccttccttcgcccaacccctggcagctctgatcttttcctgtctccatactttgccttttccagaatgtcatattgttggaatcagacaatgcgtagccttttcagatgggattctaccacttggtaatatgcatttaaggttcctctgtgtcttttcatggcttgagagctcatttctatctatctatctatttatttatttatttatttatttacttatttacttatttatttatttttgagatagagtctcgctctgctgcccaggctggagtgcggtggctgtgatctcggctcactgcaagctccgtctcccaggttcaagcgattctcctgcctcagcctcccgagcagctgggattataggcacctgcccccacgcccggctaatttttgtatttttagtagatggggtttcaccatgttggtcaggctggtctcgaactcctgactttagatgatccacccgcctcgatctcccaaagtgctgggattataggcgtgagccaccatgcctggcatcatttctttttcttttcttttcttttctttttttttttttttttgttgttgttgttgttgttgttgaggcaaagtttcactcttgtcgcccaggctggagtgcagtggcacgatctcagctccctgcaacttccgcctcccggtttcaagtgattttcctgcctcagcctcccaagtagctgggattacaggcgcctgccaccacgcctggttaatttttgtatttttagtagagatgggtttccccatgttggccaggctggtcttgaactcctgaccctgtgatctgtgggccttggcctcccaaagtgctgggattacagatgtgagccaccgtgactggctaatttttgtgtttttagtagagatggggtttcgccatgttggctaggctggtctcgaactcctgaccttgtgatccgcccgcttcggcctcccaaagtgctgggattacaggcatgagccactagagtctctttgtgaaaaggaatggaaggatgtggtgtgat[139 bp omitted]catggcgaaaccccatctctactaaaaatacaaaaaattagccgggcgtggtggcaggcacctgtagtcccagccactcgggaggctgaggcaggagaatagtttgaacccgggaggcggaacttgcagtgagccgagattgctgcactccagcctgagcgacagagcgagactctgtctcaaaacaaaacaaaaaaagcttaccctccatgatgcagcaatcccactactgggtatatgctcaaagaaactgaaaccagtgtgtggaagagatgtctgcacccctatgtgtattgcagagttattcacaatagccaacatatggaatcacctaagtctccatcagtggacaatgggtaaaggaaatgtatatatacacagtggaaatactatccagccttagaaaggaaggaaaccctgtcatttacagtatggatgtaattgtcaaccttcaggacatcatgccacatgaaataagccagatacagaaagacaaatatcgcacaacctcacttatacatggaatattaaaaagttgaactcaggccttcgagactagccatggccaacatggcaaaacctactcgggaggctgggcacggtggctcacgcctgtcagcactttgggagaccaaggcgggcagatcacctgaggttgggagttcgagaccagcctgaccaatatggagaaaccccgtctctactaaaaattcaaaattagccaggcgtggtggtgcatgcctgtaatcccagctactcgggaggctgagg[166 bp omitted]aaggggagtagggattgggaagatcgtggtcagagggtacacaattttagatagaaaaaaataaattcaagagatctgttgtgcaacatggtgacaaattagtgaaaatgtattatgtacttaaacattgttagcagaatagatcgtaagggctctcgccacacacgcaaaaatgacaactatgtggccacgaacggtggctcacacctataatccaagcactttgggaggctgaggcaagtggatcacttgaggtcagcagtttgagaccagcctgggcaacatggccaaaccccatctctacaaaaaatacaaaaattagccagacgtggtggcacacacctgtaatcccagctactcgggaggctgaggcacaagaatcacttgacgtgggaggtggagtttgccgtgagctgagatcgcaccactgcactctaggctgagtgacagaatgagactctgtctcagaaaaaaaagtgaggtgatggatatgttaaacatcttgattatggtaattatttcacaatgtgtacatatgtc[139 bp omitted]cctcagcctcccgagtagctgggactacaggcgcccggctaatttttgtatttttttttttagtagagacggggtttcaccgtgttagccaggatggtctcgatctcctgaccttgtgatccacccgcctcggcctcccaaaatgctgggattacaggcatgagccaccgcgcctgaccaaatatatacgcttttatttgtcaatcatatctcaattaagccaggaaaaaattggtaaggctacttttggaaacactttgacactatttcaaaaaattgaaactaacaatccctatagcgcaatcattccattcttatatgtatactctttaaaaattcttgcacatatgcaccaagaaacatgtaaaaaatgtctgttacgtaatagggaaagtaaaataaatagaaatagaaaagtaactaaaataaaagaagcccatgtgttcatcaacaggtacaaaaatacaaaaactgtgatatagacctatattggaaagcttcaaactatggcattgaaaatgatttcacgaatcatttcaaaaaaaaattcatggtttctgttgtcatttttaccaagttcattccaatatgtggtttagagacactattttaaacaaataaggggccaggtgcagtggctcacgcctataatcccagcactttgggaggctgaggcgggcagatcacctgaggtcaggagtttgagaccagcctggacaacatggtgaaaccccgtctctactgaaaatacaagaattagccaggcatggtggtgcgcgcctgtaatcccagctcttcgggaggctgaggcaggagaattacttgaacctgggaggcagagtttgcagtgagccgagatcattccaccgcactccagcctgggcaacagtgtgagactctgtctcagaacttaaagtagaataaaataaaataataaaataaaacaaataagggaacgacaagcacagttacttctgcagaggaggaaagtggaggatgagaatggaaggagattccaggtagatgaggtggtcgggatgagattgtagctcttaattggatggtgggctaagtgaggccgtttcgttaatgtttcatgattcaagctgttttataaattctcttttatttatgaaaaatacataatacatgtttggtaaagtgatcaaactttcttgatcaagatatcaaaagaaagacccaagattttattttctatttctttctttttctttttttgagacggagtctcaccctgtcacccaggctggagtgcagtggctcgatctcagctcactgtaagctccacctcccgggttcacgccattctcctgcctcagcctcctgagtagctgggactacaggcacccgccaccacgcctggctaattttttg[132 bp omitted]atcagttagctattgctgtgtaacaaatcacctcaaagggagcagcttcagacaacacacgtttattgtcttgcgatttccgtgaatcagggatctgagcacagcccggctgggtcttcagcttcagggtctctcccgggctgcaatcaaggggccagcagctttgtggccatctcaaggttctgttgatttcatggtgttgctggcagttcagttctttgctgactcttggccagaagccacccctcagttccttgccatgaaagttttctgcaacaggatagctttgtttcatcaaagtatgcaaactaagcaggcaaaaagagtctgctaacagaatgcaagtcacacaatcatccttaaaaggacgggattacatgatgctataaataccaggaggtgaggattattggggaccatctgggaggctgcctaccacaccgcacaaggcaaaccttatgaatatgtatggattatataggttgctttcaggcttccaccaaaaataggattgccttacagctctaccagcctaggacccaccccagcaggtgtggcttgcttgttttaagggagcagagacagagggttccttatatcccacagccaagcccttacaggcacagcagggcagctgcttaaggtggagagggagtctaaccggttttcttaccatgcttagggcagaaaacataatctctattttgccatgtaagactcaccactgagcagtccctctctttcctctgtattacactgacacttcacataaacctctaaacctcatataacctctaagcagagataggcttcataaaggaatttagccagaatgccacattatttttccttgttgcagagagtagcatctatcttatgggaagagtcatagaa[181 bp omitted]gtgttggcggttgcctgtagtctcagctactcaggaggctgaggcaggagaatggcgtgaactcgggaggtggagcttgcagtgagcggagatcacaccactgcgctccagcctgggccacagagcgagactccatctcaaaaaaacaacaaaaaaaaaaaagaaaagaaaatggtcaggccgggcgtggtggctcatgcctataatcccagcactttaggaggc[137 bp omitted]tcaggcaggagaatagctaaaacctgagaggtggagattgcagtgagccgagaccgcaccactgtactccagcctgaacaacagagggagaccccatttcaaaaaaaaaaaaaaaaaaaggccgggtgcggtggctcacgcctgtaatcctagcactttgggaggccaaggcgggcggatcacctgaggtcgggagttcgagaccagcctgaccaacacggagaaaccccgtctctactaaaaaatacaaaattagctaggcgtggtggcgcatgcctgtaatcccagctactcgggaggctgaggcaggagaatcgcttgaacccgggaggcagaggctgcagtgagctgaggtcgagccactgcattccagcctgggcgacagagcaaaactccatctcaaaaaaaaaaaaaaaaaaaaaaggctgggcgcggtgactcacgtctgtaatcctagcactttcggaggccgaggttggtggatcatgaggtcaggagatcaagaccatcctggccaacatgatgcaaacccatctctactaaaaatacaaaaattaactgggtgtggtggcgcatgcctgtaatcccagctacttgggaggctgaggcaggagaatcacttgaaccagggagtcagaggttgcagtgacgggagatctcaccactgcactccagcctgggcaacacagccagactccatctctttaaaaaaaaaaaaggcccacattgggccgtgtgatgggggatcccactctccacctcaaaggatagaatggattccacctttccctccacagaggaaggcagaaccagacttcccactaagactcagactgacagggacctctttccaagtagcaaaaaggttcatacacggaaagcggaaaatgacaaattatgacttgccacggtgcatagcagccaaggtggttcccaaaataaaacctcttcccacacactttgtgccaggtgccccacgtcttttttttttttttttttttttttttttgtaattaaaggagatcgacaaatctggggtgagaaggttggtagaggatgagtttttccttcaacatcttattataaaaatttttcaagcatagagaagagttgaaagaatcttagaatgaataccccatccacaccacccagacacccagactcaaccattcacaactttttttctttttcgagacagagtcctgctctgtcgcccaggctagagtgcagtggcatgatcttgactcactgcaacctctgcctcccaggttcaagcgattctcctgcctcagcctcccacatagctgggattgcaggtgtctgccaccatgcccagctaaatttttttttttatttttagtagaaacggggtttcatgatgttggccaggctagtttcaaactcctgacctcaagtgatctgcccgcctcggcctcccaaagtgctgggattccaggcatgagccaacatgcccagctaatttttgtatttttagtagaaacagggtttcattatgttgaccaggctggtcttgaactcttgacctattgatctgcccgcctcagcctcccaaagtgctgggattttcaggtgtgagccaccacacccggctgttgcacacatcttaagtacaccattaactgtgtgggtttttttgtttgttttatttatttattatttatttatttattgagccagagtctcgctctgtcaccaggctggagtgcagtggcacgatcttggctcaagcgattctcgggttcaagcaattctcctgcctcagtctcccaagcagttgggactacaggtgcctgtcaccacgcctggctaatttttgtatttttagtagagacagggttccaccatgttggccaaaattgtctcgatctcttgacctcatgatcctcctgcctcggcctcccaaagtactgggattacaggcgtgagccaccgttcccggcctaagcgtgttttaaaattatatactgaagcccctatggagacatagaatatggccattgtcacagcaagctcccaaatgcacctgcccagtcacatcttgcctttactcccctggaggctaccactcttctgatattattattttttcactatagactaatttcaactgttctgggacttcacgcaagcagaatcataaactctcagaaaactgaactctcctctctggcttcttccactcagctcaaagtttctgagattcacccgtgctgctgtgtgtgtccacagtccgttcattttcactgcggggcaggattgcattgtacggggttccgtggtttatttatcctttcttccactgatgaacacctggctgtttccagtcttgggggctcttgtgaacaaagctactgttaacatttctatttatttatttatttttgagacaaagtcttgctctctcacccaggctggagtgcagtggcgcgatcttggctcactgcaacctccgcctcatggtgcaagcgattctctgcctcagcctcccgagtagctgggattacagacatttgccactgcacctggctaattttttttttttttttttttgtattttagtagagacggggtttcaccatg[139 bp omitted]tccagagcccagcccccagccacctccatttctgagctctcacactcagggctgctgtgcacctgccttcatcacccagggccaggaaccagaccactagagtaggcccaatgccccaggccctgctgaaattattcaaattagctaatcacaaacctgtttaccctgccccacccactcattcctgcaaaaaccaaatcaagctcttgccctctctccgccctcactccctctgcctctgatccctcgtgctctcccgtgtgacctgcatgctccctcggccctggtgctctctgggtgtcctgcctggcctggcatgtcccttcctcttgagaactgtgacaaactgtcttctcagtggtccatctcatctgctgggccccccatacctatgtatgaaaacatcttgaagccgggcgcggtggcttacgcctgtaatcccagcactttgggaggctgaggcaggtggatcatgaggttagtgtcacgcgagtccgtgtgaagagtccaccaaacaggctttgtgtgagcaacaaggctgtttatttcacctgggtgcaggcgggctgagtccgaaaacagagtcagtaaagggtggtgggattatcattagttcttacaggtttggggacaggcggtggagttaggagcaatgttttgcgggcagggggtggatctcacaaagtacattctcaagggtggggaaaattacaaagaaccttcttaagggtgggagagattacaaagaaccttcttaagggtggggaagattacaaagtacattgatcagtcagggtggggcaggaacaaatcacaatggtggaatatcatcagttaaggctattttcccttcttttgtggatcttcggttgcttcaggccatctggatgtatagatgcaggtcacaggggataggatggcttagcttgggcttagaggcctgacaggagttcaagagcagcctggccaagatggtgaaaccccatttctactaaaaatacaaagaattagccaggtgtggtggcatgcacctatagtcccagctactcaggaggctgaggcaggaga[145 bp omitted]ttggaaggccgaggagggcggatcacaaggtcaggagttcaaaaccagcctgatcaacatggtgaaaccctgtctatactgaaaatacaaaaattagccaggcgtggtagcgcatgcctgcagtcccagctactcaggaggctgaggcaggagaatcgcttgaacccgggaggcggaggttgcagtaagccaagatcatgccattgcactccagcctgggctacagagtgatactctgtctcaaaaaaaaaaaaaagaaagaaatacattggcgtggttcagaaaggtggaacaacacaaagggtggggcgaggcgtgcaatttaaacattttctgattgacaattggttgagttttctctgaagacccggaatcaatagaaaggaaatgttcaggttaagctaaaggatcgtggagaccaggttttattgtgcagaggaagctgacttcagagagagagggcagggtgtaaaatgcttcttacaggacctaaaagagtgcctgggccggccacggtggctcacacctgtaatcccagcaactttgggaggtcgaggcaggcggatcacctgaggtcgggagttcaaagccagcctgaccaacatggagaaaccctgtctctactaaaaaatacaaaattagctgggcgtggtggtgcatgcctgtaatctcagctagttgggaggctgaggcaggagaattgcttgaacctgggaggtggaggttgcggtaagccgagattgtgccgttgcactccagcctgggcaaaaagagtgaaactctgtctcaaaaaaaaaaaagagtgtctggctctcctgggcctggaaaggaagaagggaaaacaaaggagaaacggggttctgtaaagaatgtggatttttcccacaagagactttgcagggcaatttcaaaatatggcagagaaacatgttttggggtaaaatatttttattttcttccttgtgttgtaatgctatgccagagtcagattggaaagtaagtcacaccatagaggattaaatacaacccatctgatgagaatttatggtttgtaaggcatgactcctcaaacgccttaggtaggaatttgggcaagataaaaaaatcagagcttagttctcaggggtcatggcgggacaacaggagagagcgtctc[137 bp omitted]caaaaccccatctctactaaaaatacaaaaattacctgggtgtgatggcatgcacctgtagtcccagctactcgggaggccgaggcaggagaattgcttgaacccaggaggcggaggttgcagtgagctgagatggtgccactgcactccagccagggtgacaagagtgaaaactctgcctcaaaaaaaaaaaaaaaagaatattacagtgaaaacctagatagttatcacctggattctagtctactgttaatcttttctccttccttccttccttccttccttccttccttccttctctctctctttttccttccctttctttctttccttcctttctctctgtttctttcctttctctcccttctcttttcctctttctttctttcctttctctccctctttctttctttcctttcctttcccttcccttcccttccactcactcactccctctctctctctctctctctttcctttctttctttctttctttctctctctctccctccctccctccctccctccctctctgtctctctctctttctttctttctttctttctttctttctttctttctttctttcttctttcttaagacagggtctcgctatgttgtcccggctacagtgtagtggttattcacaggtgcaatcatacccacagagcagccttgaacttctaggctccagtgatcctcctgcaccagcctcctgagttgctgggagcacagactcatgccactgtaccttgcttaatatttatcttcctttgccttattacctatccctccatccatccgtcttattttcttttgtgattaacttcaaaaagagactgcagacaccactacactttctcccaatactaagcatgcacctcattaacatttttcagtaaaatttttatagagtggagtgcacaaatcttttttttttttttttgagatggagtttcactctttctcccaggctagagtgcagtggtgtgatagctcactacaacttccacctcctgggttcaagcgattttcctgcctcagcctcccgagtagctgggattacaggcatgcaccaccacagctggctaatttttgtatgtttagtagagacggggtttc[132 bp omitted]aatgcagacactggtacaaaacgaaccctcatcaagatacagaacgaggccctttatcccaggaagttcccccagcccccttcccagtcaccctgaccctactcacccagaggcaaccactgtttttattatttttgctaccatatgttaattctgtctgtttggaaaatcatctaactgaactcatacagtgcatcctcctttgtttctgacactcagcacaataattttgagaccgacccatattgctgcatgcattattagcttgtgccttttcattgctaagtagtattccattctgtggctatattacctatcttggtccattcccctgttgataggcatacaggatgtttctagcctgaggctattatgaataaagctgctgtaaacagtcttgcaaaattcttggtgtggataaatattttcttttcttttgggtaaaagtagaattgttggccgggcgtggtggctcacgcctgtaatcccagcagtttgggaggccgaggtgggcagatcacgtgaggtcaggagtttgagaccagcctggccaacatggtgaaaccccatctctactaaaaatacaaaaattagccaggcatggtggtgtacacctgtagtcccagctactcgggaggctgaggcagaataatcacttaaacctgggaggcagaggttgcagtgagctgagatcatgccattgcactccagcttggtgacacagtgagactccgtctaaaaaacaaacaaacaaaaaagagtagaattgttgggtcatgggataggtgtgggcttagatttgtaagaagctgccaggccttttcctacagggtttgtaccctttactctctcatcaataatggataacactcgggtgcttcattcctggaatctttggatctcaggcctgctttgggctgttggtatttcactgtggttgaatgcagctctattagtcagatttgtccaaagaaagaaaaccaaagagatatataaagagataccagcagaggtttattatgagaacttttcttacacaattctggaggctgaggagtcccacgacgtgctgtccataagctgaagaagcaggaaagctggtggtgtcattcagtctgaggctaaaggcatgaggaccaggaagtttgatgtcctagggcaagagaaaatggatgcgccagttaagaaaacacagtgaattcgcccttcctctgctttttgttctattcgagcctccagcagattggatgaggcccgcccacattggtgagggagaacttctttactcagtctactgattcaaatgctcacctcttccagaaacacccccacagacacatccagaaataatgtcttaccagctatctgggcatcccttaggccagtcaagttgacgcataaagttaaccatgacatcagcttatttaataaactggctatatctgcatatttgctcatttgcctaatgagttatctctatcatgctctgtgaaagcagagattttcatccctttagttcactgctgaattcccagggcctagaacaatgcctggcacctagtagctgtccaataaataaatacttggggaatgaacaaaccaatgaatgtatggattcttctttattattaatagatcccagggcttacttaacacagcctggcagctattaaacatgtaatcgaaagaaaggaggggaaaaggaaggaagaaggaaggtagcaatgaaggaagaaggaaggagggaagaaaggaagggagagagagaggaaggaaagaaggaagaaagggagggaggaaggaggggagggagggaggaaaggaaggaaggaaggtaaaaaggaagagagggaggaaggaggaaggaaggagaaaggaagagagggaggcagggagggagggagggaggaaggaaggggggagggagggagggaggaaggggggagggagggagggaggaaggaaggaaggccagaaggcaggaaggggtagggagggagggagggaaagaggaaagaaggaaggagggaaggaaggaagggaggcggggagggagggaaagatcataaggatgactgaacatctgaaggctgaacagctttacgtatttatgccttttccggtcattttcttatgtacttgtgaattccttcactttgctttccttctatttggcagatgtcactgtagtcatttttaaaaatcaacaactgtcaccctcgtaataattcgcgagcgcttgtcaagcactttgtcagcaaacacttcccgtgtgttcactcgatctgcacaacaaccctgtggaattggttaaggttgctctttcttgcttttttttttttttttaaacagagtttcactcttgttgcccaggctggagtgaagtggtgcgatcctggctcactgcaacctctgcctcccgaattcaagcgattctcctgcctcagcctcctgagtcgctgggatcacaggcacgtgccaccatgctcggctaattttcgttatttttagtagagactgggtttcgtcatgttggccaggctggtctcgaactcctgatctcagctgatcccccccgccttggtctctcaaagtgctgggattacaggcatgagccactgagcctggccaaggttattattttcatcctgtttatgtgaaccgaaagcacagagttgagaaaattgtctaaggtcaccgagctaataaggagctgagccagggttgaaaccagataatgtggctgcaaagcatgaactcttagtcatgccaatcatgaactaaagagcgtccttcatttgtgtctctgttcagatatcatccaaatggagaga[222 bp omitted]gaggcagataattgcttgaaccggggaggtggaggttgcagtgaaccaagatcacgtcactgcactccagcctgggcaacagagcaagactctgtctcaaaaaaaaaaaagtagtgaccacctcatccccaccacatccactcacatctatgtgttgcttcctcttacctgatagtatagactcagctcacctgttcattcctcaattttctaccttctgtactccagcggttttagttgtgccaactggagactttgtcttttttgcttatgcccatttctccagaacatgcagcagtgcctgggacatagtaggcactcaatacgtgtgtggggaacagatacatcattgaagcacagctgttagcacagcacacatggtcctgatttattgagaacctactatgtgctaggcacaggaccaagcagttggaaatctctcctggcattcttacagccactcagttaagcaggcaagtctcccaaagcttaagccgtgggaagcacatgctgagtccttcagccaggagctgtccttgccttctgtcagcagaagctggtcaggaggccttcccggaggaggcagcatcactgcctcccccaatcttccctcccatccctgtggctgctccttctcagtctcattgtgggcccctctttctccacttgtccctttcatgcctgtactactccatgtctggctagaccagagcttataaaccagccagctccaacccacagacaggttttatttggcccacacagcatttttttttcatttgaattagttttaacatttaaaagctgagggattttgcttttaaaaatatccagatttctgccttctcttggaaatttggaacatctggtggtgccaggtccctcttcccatatggcaagcgttggctgaaacgaaatagcaacagccatgttctctgagctaccctctaccagggggtttgcatgcgtcccaagccatgaatgaacacctgcagagcttgagatggtttaggggtggtattcagccaagggctctagaaatacccaagggccacctggaatgaccgtttgttttcctcagcagaaacagacccagggaaccacggccggagaaggtagagataatacatttctgtcaggcagcattgcagatgtcccatgcaggaggatggatgtcctgggtttaatcgatgcaggctaagccattctctaaagaggcttgccttctggggcccaaaacacatgtgagggagacagagaggtggggacagaaagagccagagtaaagcagagagagagagagaaagagataaagagagagagagagagacagagagagagacaaagagagacagagagagagagagaaacagagagagagagacaaagagagagagagacaaagacagagagagacagagagagacaaagagagagacagagagagaaagagagacagagagagacagagagagagacagagacaaagagatagagagagaaagagagagagacagagagagacagagagagagagacaaagacagagacagagaaacaaagagagagagagagacagagagagacagagagagacagagagagagagagacagagagagtgagagagagagagagagagtccatcaatttaaagtctttttctaggggaatgaaggggaatggcatatgtggtgactatggggtgtgtgtgtgtgtgtgtgtgtgtgtgtgtgtgtgtgtgtgtgtgtgtgtatttcatgtaagaaagcagcatgctgaggacacagcagcaagaacaaagcaatgagctccccctggaagccaatataacttacttctacttagtaacatttaccccttttcttttttaagacagagtctcactctgtcgcccaggctggagtacagtggcacaatctcagctcaccgcaacctctgcctcccaggttcaagctattctcatgccttggcctcctgagtacctgggattacaggcacacattgccatgtccagataatttttttgtatttttagtagagacagggtatttttttttttttttgagacagagtcttgctctgtcacccaggccggagtgcaatgacacaatctcggctcactgcaacctctgcctcccaggttcaagcaattctcctgtctcagcctcccgagtagctgtgactatgggagtgtgccatcacatccagctaatttttgtatttttactagagatggggcttcaccatgttggccaggctggtctcgaactcctgacctcgtgatccgcccgccttggcctcccaaagtgctgggattacaggcatgagccaccatgcctggcctgtttgtttatttttttgagttggagtcgtgctctgttgtccaggctggagagcagtggcacaatctcagttcactgcaacctccgcctcctggattcaagcaattctcttgcctcagcctcccaagtagctgggattacaggcacacaccaccatgccaggctaatttttttgtatttttagtagagacaaggtttcgccatgttggccagactggtctcgaattcctgacctcaggtgatccactggcctcggcctcccaaagtgctggaattacaggcgtgagccactgggcctggccgagacagggttttaccatgttggccaagctggtctcgaactcctgacctcaagtgatctgcccacctccacctccccaagtgctgggattacaggctcgagccactgcgcctggcccccacttaccccttttctaacaccaacccagattgttctctgcaattcaggattcatgtttctcaggtggcaatccaagatccattagccagccacaaaacaatttagaaggttgtgaccagatttgaattacaaaatagaagtaacagaggatagaaattatccaagagcattgcacatagtggtcagaaactttttacttttttttttttttttttttttgtgtgtgtgtgtatactagatcataatgtaaaatgtatttctcactgtgggttgtggccctatcagttggaaaccactcatctagaatattatccatatggagagggctgatgcagggccaaatgatggagggtataaactcagggctgagggtgtgacttgattctatgggcaacgtggagccactgagctctattgggttgcacagtcaccaccagcacctcactgtcctgcactctgatgtacacatgcccaactgtgcacatcatgacgtttggaattcttcccattagcaaatcctgctgctacaacaaacactggctgtggacatgatgcaagagattgtcagaacaagagttttagaatatactaatcttagccctaaagggttaagccttcattttacagacagaaaaagagggactctaagatgaaaaactacttgcctagagtcacttaatacacctctaaccgctcatctcgggatcttcttcatccccaagccccatgtaggccacctggttgggaatggtggagaacatgactctagccagaaccagagaaagctgaagaagacctagggtagtgatgagagagggtgtgtgtgtgtgtgtgtgtgtgtgtgtgtgtgtgtgtgtgtgagagagagagagagagacagagataaggcgcctattctcactctcccatttcatcatcaataccttcaccaatatcactatcctcctcctcaccgtcatcatcatcgtcctcatcaccatcatcaccaccatcatcatcatcattatcatcatgacatgtcaacataatcttgtcttcaccaccatcatcatcatcactatcatcatcatcatatcctcatcttcaccatcaccatcaccaccaccaccaccatcaccaccaccaccaccatcaccaccgtcaccaccatcaccatcaccaacatcatcaccaccatcaccaccatcaccagcatcatcaccaccatcaccaccatcaccaccaccaccatcaccacatcaccatcaccaccatcaccaccaccatcaccaacatcatcaccaccatcaccaccaccatcaccaacatcatcaccaccatcaccaccatcaccaacatcatcaccaccatcaccaccatcaccatcaccaacatcatcaccaccatcaccagcatcatcaccaccatcaccaccatcaccatcaccaacatcatcaccaccatcaccaccaccaccatcaccaacatcatcaccaccatcaccaacatcaccaccaccatcaccaccaccaccaccatcaccaacatcatcaccatcaccaccatcatcaccaccaccatcaccaccatcaccaccaccaccatcgccaccaccatcaccatcaccaacatcatcaccaccatcaccatcatcaccaccgtcaccaccatcaccaccaccatcatcatcataattatcatcatgacatgtcaacataatcatgtcttcaccatcatcatcatcatcaccatcaccatcatcaacaccaccaccaccatcatcatcaccatcaccaccatcaccatcatcatgacatcatatcaccaacataatcaccaccatcatcgtcatcaccaccacctccgctaccaccagcattcctcttttccctagccctttcttgccaatctggagcaaaatatggaaatgggttaagtggagaactaatctccctttcttccactcatcccaattcccacaagagaggccacgtgtgtggtttccagatggcaaagtctcaccctgccctacagcaagaggggacccctggggccagattcctgagcacctagttttggctgcaatagtgacagtctgggtgatgatgtcagggtggccaggtcccctcccagggttggcacttccccatctatcggtgtggcatcggaggattccagtgagatgtaacatggggagtggctggaaaaatactctgtaactgtatggcgaatgccaaggggcaggggtccttgtatacaccgaagtaatcccgagtcagtttacaggatgggaagggcccctatatagatgaccagggtccttatgcaggtagaaggggtccttatgcagcatgaaggcttgctacacaggcgtgtggatttttccatacattctggagtagcctctacacataggagtgtttgtgcttagaagctgtgtccttatgcaggctaggaataaaagtgggacggagattttacacaaatacgggcatcttttacaggtgggagcactttcgtacacagaggacttcttatccatggaattggccgttctttgtaaaacgctctgtacttactagcaacctttacacagacatgaagtttctccataaggataaagggatcattatgttttaggtgaaataacagtatgagtggcctcgtatggacaaggagggctgatttcaatcgcgatgcaagccagctgtccggatgccgccgacgccagcagcgcggtacctgcgcgggcagcaggtgggagccgcgaccggggtggggcgcggagcgctgggggcctcccgactcccgcagtccccgccgcgaccaccaggggcagcaccgtccccgcccggcccgcgcctccctccccccaatctccgccccccaccccctgcctcccccccgctcccgctcccctgagcccagccagaccccgcgccgcccgcgccccgctcgactccggaggctcccgcagccccggcgtccgccccgctgccccctcccccgggggccatgggggcgcccccgggctaccggccctcagcttgggtgcatctcctccaccagctgccccgcgccgacttccagctccgcccggtgcccagcgttttcgcgccccaagagcaggaataccagcaggtgggaccgggcgccagggcctgggggccagggctgggggccggagctcctgggtcccgagggagaagggggctgggtcacagatttcctgagctccgccggaggctgggggccggcccggactttggggtttcggagggaggaggagcctgggggcgcccatgcctggaggttctcctgggacgcgcgctgggggtccagacctcgagctctctaaataagggaaggctggggacctgcacccctgagttcatggagaggaggggaggggggcccggattcccgggtgtctgatacctgcctgggaagccggcctccagggtcatcgggagggtaggtctactcttcctgccctaaaagatgaccctgccccacaggatcagagcaggtgaatatgtcccagataaggtgggacccaggagacagcggacctgataacggtggcggggaaaacgctggctgctgcggtgctgggatgggattgagagtctgaaatggggaagggggcttcaggggctgaggaccagggctggaaaatgaaggggctctgggagaggaagcttcttgcccgtcccaagaaagaaggggtggtcagggcgctgcaggggtgagggccgagatgaggctgggtttggggagcctcgggatgacagacccgggtcccgagggtggggccggtgtgggaacctcacagaagccggtgtccctggggaaggggcccggctcggggcagctccaatgggcgaaagagctgtcccctgacccagtttaattcaagtccttgacttcgagattaatgaggagaaaggcttggctgagctggggacgggtgggggtgctgggagtcccgatgtggccccaggacgggtcctggccctgctgatggggcctgagcccctgggctccgtcttgggttgctcctgggagaagggggctgggattggagagctcagggggcgtggagggggtcccagaaaagcgcggaggggatgagtgctgtgttctgagctatttgggtcacggctggcacagccctgagcagctcttccccgcctgctcctcgccgccccctctccccacacacggggaccgccgtcccctcgcccacagcctcgcggttacacaacggccacctccaacaacgccgctccaccggctccggcctcggcccagactcacgcccgctctggcccggagacctcccgaagccgcacgcggggatccgcggccccagtcaccgccagaggcacgggtttgggggagcctcactccgcccccacggtcgggggtcagggtcagggtggcagggatgcgcgggcagagccccacagccgaggagggcaagggggacccctgcagggacgcgaccaccgtgggtacagctgcagacacagccagggcctcagggacactggcccgggggaggcacacagccacacgcacacactcactggcatatgcacagcacacacacacgtccacttactcccattacacactcacatgcacacacatatgcacaggcacacccagacacgcccacttattccaacacactcacatgcacacacatatgcacaggcacactcagacacacccacttactcccattacacactcacatgcacactcacatgcacacactcagacacgcccacttactttcattacacacatgcacacacacatatgcacaggtacacacacacgcccacctactctcattacacactcacatatgcacacacacatacccatttactactcccgctatgcactcacacccacatacaacacacgcatatagacacatgcatacactcacatggatatacccacttacacatacacaatcacacatatgcacacgcacattgcgcacagtgactcacaacacacacatacacatgtataagcatttactcccatatacaagcacacactgcacttatatatatatgcttacacactcatgcatgcaccgtcacatacacgtttatactcccatacacacacacacgtacattccattcacatctacacacacatgcacacacatattgactatagcattcatgtgcacacacacactcacatgcagtcacgcatccacacacacactcatccacactgttacacacacacaaccggacccactcacaggcccaaggaactgtgcccagaacacacaaatgcccacagatgttctcatttgcagacagcagtgcacccaggagacacactcaggtgccccctcatctcatggagacagcccaaagataaaaacatccagtctcaaccagaaacacaaacactgcacacacttgggacacacacacacacacacactgtgccactgtgtgtgtgtatgtgtgtggacaaaggcagaaacaccgtggtttaggggaaacagccttggcaagtccagaggtgtgactctgatcccaatgttgtccctccatgctccggggctcagtgcaaaccccctgggccactgtgggcctctgggaccgcacaggtcagctgtgaaatccccgccacgtggagagccctgttattctgcaaggctctgcccaccgcagaacgtttccgcggcctgcctgtcttccgggccttggctctctccgcctctctgtccttgtgtgtctctcccgtctccatagtgttctcacgctctctctcccttactctgctcttcctctctgatttgatcccttttgctctctgcctttttctgactcatgcccgaaccttgtcttatctttgtctctttttttggttgtgtctttctgcctgtgcctccctccatctctctctctctctctttctgttctgtcttcactcttccagtttccatttctgagtcttgcatacacacacacacacacgttgccacacagcccctcgtcccgtccctgggtgacaagctcaggcgctgtggggtgtagcgctcagcagcaggggagacagtgagcagggaggagagggggaggaagcacgcctcccccagcctggcccgaggcaccaggaacaggtgcccccacacccccacccgccccctgatcccacacgattgtggaggggccttggcaggtccttgggaaaacctccattccaactgctggctgcagagagaaggaaacccaggctcggagaaggggcggttcctgctaaagattgcacagccaatggagggcagagcagaattgggacccaaggcttggggcccccagttggaagctccctccagcaagctggccctgacacctggagccccagctgccagcctgggaggggctgggacccaatctcccccaagattaggccagggatgtctcccaccttcactctgacatcccagaccccgaccccccagccacgcaggaagggggatctgagtgtggaacacacgggtgccctcggaggtctgatgtcacccccttccccaggccttgttgctggtggcggccttggcgggcctgggcttgggcctgagcctcattttcatcgctgtctacctcatccgcttctgctgctgccggccccccgagccccccgggtccaagatcccctcgcccgggggaggctgcgtcacctggagctgcattgtcgcccttctcgccggctggtaatggggccccagggtgggtgggcggtggggacagggctccccaagctctttgctggccttcctgggggtgtcctccggggacatggaggaagcagacaggaaggaggaaactccctcgtccctgtccctgccatttgcaagcccacttcagcgcacagcaggaaggactgtcccatttgatggatggagaaagtgaggctctggagaggaagtgaatcaagggcagccatctggtgagaaggcgcaggggcagtcagatggcctggttttggtggctctcccattgaatagctgtgtgacctaagggagtgatagtctccctgggcctcaatttccacatctgtaaactgggcattatcatctcgcccacctcctgcgggggtaagatggagagaaagcacagtgtctgacttgcagctactctcagccaacattaactggtgatgtctgtcattccgtcattcaccagctcattcattcgacaactgtttattgagtatttactatgtgccagatactgaccaagccaggcaaggagcccctcgtgcagcttatgttctaatcagggagacggacgataaatagatataatcaccctccaagagcacctcatctgtgcccagacctgagctggtctaattccttctcacaataatgctgctggattcaggggtgtcaggcccagtttccaaagaggaaggctcagggacagaggggaggtcacctttcaaggccacgtggcttaagaggcagcacagagattcagacccaggttagtaggaccccctcacacccctcaaagcgagcttagggggcttccaatgtgaacacaccagctaccaagaacgagctctgagcacagccccctccccggcagggcagcacccacaggttgcagacagcaatcctcttccacagacggggggtcccagagggccagacgcctgccccggacccacagcgggcaaggggagggacctgtaggggtggcctgtattcaggacgcttcctcctccggctctctggcgtggggggagacaggggaggtggacaaaggcccagtgggggagagacacggccccagcccccgcagcctgggaacaagaggagctttgtaggactctgaacaatggggcggggacactgggcgtccgacccgagggatgggggtggaggcccagccggggctgggaaccgggagggtgtcaggctcccgccccctccactgcgggacaccggccgggggcggggacgggaggggtctggggccccacattcaggtcccacaatggagctctgtgtgtcggtagggtgggggcgggggcacggcttctcgcccatcctccagcctccctcccacattcccttacttccctcccagctggcccgacgcttgggtcccgggtgggggaaggccgagagctccaggctcagcgtccccccaggagatggtggcagctgccccccttgtacccttaggaacccccaggaggtgggggcggagaacgtctcagcactgaagggttggcactgcaggccccaaggaccctagggcaccctaggacaggtgccaggagggctgcctgcctggcaaaggatgcgggggaagggtgtggggcaggcagtcctagggaggggaagacggcccatcccggagctgggtgtgactggggttctgctccagggaggtgcgagttaaatcgggggctccctcccccccaccactccacccaccattaacatcacaatgacgtccctccgctgggggagtgaggccttcccgttcccttggcaaccgacgggggccaggctgaagtcgcccttttcccacgggctggcccaatgaggtggggctgagatgggaggggtggataagaaggcgaggtggaggggatggggtgggaggggacggtggcccccggggtcctgggacccgctgagattcctctccctcctcctccgctcagcactggcattggcatcggtttctatggcaacagtgagaccagtgatggggtgtcccagctcagctctgcgctgctgcacgccaaccacacactcagcaccattgaccacctggtgaggggccagcaaccagtgggaccccagacccacacctggacgggctccccacacccaaggacaaagggatccaaactcagagctaagaccccaggcttgaagcttaggaacccagattcagaacttcatcctgagacccacagacctcagactatccacccaacccccgaccctggctgcaaattgaggacctcacacacaggcccagccctggaccttacctggaacccccaagccacacagaaaccaagcaccagcgacaccagcccctgtccacgggccagatccagggccccagacctgattcttggcccgtaagcaagctcagggacccccgccctgaggcccaggtccccgacttgaggcttcagctccgacatcagctccaggattctgggccctggggctgaggcctggccccacttcatgccttagattccatgtccagctgcagactctagaccatgggacccagacttgagaccccagattctggaaggcagatgaaaacttcagacctaaagctccacacttaatctcagtcctggggctggacttactaccctgggctcaagctaccaaccatccagagctctggatagaggccacagaactccatgaacttgatcttgaagcccctccccaatcccttcccttactcaatcctcagatgtcccagactccagatctcagacacccgctactatgcacccctccttcacttctaaaaccccatgcctcgaccgcgggctccccccaggatgtccttccagacctcagcccctgtcctatccccaggtgttggagacggtggagaggctgggcgaggcggtgaggacagagctgaccaccctggaggaggtgctcgagccgcgcacggagctggtggctgccgcccgaggggctcgacggcaggcggaggctgcggcccagcagctgcaggggctggccttctggcagggagtgcccctgagccccctgcaggtggctgaaaatgtgtcctttgtggaggagtacaggtgagacgctgctcttcttgctctctgtgccggcagctctcaggcggagtccccggggggacagttggcaatgcctggaggcagttttggttgtgacagctggggagtgtgtgcgcactgctggcatccaatgggtagagcccaggaactgttcaacaccctgcaatgcacaagaaccccctccccacccattggcagggaatgatccagccaccatgacaattatgacgaggctggccaggcgcggtggctcaggcctgtaatcccagcacttttaggaggccaaggtgggtggatcacctgaggtcaggagtttgagaccagcctggccaacgtggagaaaccccgtctctaccaaaaatacaaaaattagctgggcgtggcggcagatgtctgtaatgccagctactcaggaggctgaggcaggagaatcccttgaacccgggaaatggaggttgcagtgagccgagatttcaccattgcactccagcctgggcgatagagtgagactccatctcaaaaaaaaaaaaaaaaaaaaaaagatgaggttgagaaacctactgtggagggacagatcaccagaccccatggccatcctgacacccatgtcctcacccattcactcactcaccccctccacgtcactccactcacttattcacacatgcgttcattccttgactcactcattcagcaagtcactcttggactcagttactcctggactaacccagcaggccactcactcagtcgttcatccgtgtgacatgtgtatttgttcagcactatttttttttttttttttgagatggagtctcactctgtcgcccaggctagagtgcagcggtgcgatctcgactcactgcaacctccgcctcctggattcaagcgattctcctgccgcagcctcccaagtagctggcattacaggcaggcgccaccacgcccggctaatttttgtatttttagtagaaacggggtttcaccatgttagccaggctggtctcaaactcctgaccttgtgatctgcccgccttggcctctcaaagtgttgttcagcactatttatttagcaccctctggtgaaagaggcagcgtacctacagatcaggaacctgagctcgaaagccagccagccccaccctaaccacgcggctgcaatcaagttactttgcagacctctgccttggtttccccatctgtgaaatgggaatcggggcagcgtcccccttgttgaattggttcgagttgttgagttggcatctgagtgctgagaaggacgattagcacagggagagcaccgcagagatatgaagtgtagtcaccccggtggcgggccgggcagtgagcaagtggcagaaatccctgccacgtggctgcgtcctccggggggaaccagcaagggacaaacgcagagaaaaacattgtaaggtgttgggccatgagaactttggagaaaattacagaggggaccaggcacggtggttcacgcctgtaatcccagcactttgggaagccgaggcaggcggatcacgaggtcaagagatcgagaccatcctggctaacacggtgaaatcccgtcgctactaaaaatacaaaaattagccgggcgtggtggtgggcgcctgtagtcccagctacttgggaggctgagacaggagaatcgcttgaacccaggaagtggagcttgcagtgagcagagatcgtgccactgcactccagcctgggtgacggagcgagaatccgtcttaaaaaaaaaaaaagaaaattatagagggagatgaggtgggacagagtctggcagttcatcagggggactgagaaggtggcatttggaggagaggaggcagtgagctgtgcagtgtccaggcagccacccttcccagcggccaccatgacggtgtcctcattgctttgaccattagtaatcattcattcattcattcatttatccgacgtcagctggaggccctgcccgcggggcatgcgctgagatttgggaggccttccgggatgctgcgctccagcggggaaggccgactggggctgaaaaagctggaggtcaggacacacccgcagggcagcaggtgcaagagacagacaggcctgggtttgaagaagtccaggttctgcattgtggtcaggcccaggggctgcacaagccgggcctcagctccttctcctgggcgagggcagggaagtggtgggagccataagggtgatgccagggtgaggcagacccaccatcactagaaaatatcttccgggtgcaccactgcgaaagcaccccacacttgggagtccctcgacagacaaatcaggggcctccaagggagtcttgctggaggggagcacttgcgaggctgggcggaagcagccagagaccagggtaaggagtgaagcccaagcttgtggggcctgcagagaatggcaggaggattaactgagcacttactacgtgccgggcactgtgctgttgttacggcgggtccttgctcccggagctcccaagatcgtggtggccacttccaagagggcagcaagcctcgtgttctctgacctggggttcttggcctcacggattccaaggaatggaatcctgggccctgcggtgagtgttttagctctattagaagccgtgggtcacggaagagaaccgtggaacccagcgaccagtgttcagctcgatcaggatgaacccaggcagttagctgtgcaggaacaatggcgagcctctagcccgattgggagcggcaatgggtgtctccctggatcacgagcacagtggacaccctgccggatccggagggtggaagtcagcggcgggtctgcgacggcggcaaacagcagtggtggacggcgagcgaaagctcagctcaagccgtaacagacacggaccagaagagtgtgcagtttcaagttttaatagagtgaaaacagagttcccatacaacgggaggggacccaaagtgggtagccgttgctggctggaatgcctgggtttctatccagatcattgtcccttcccctgtgctctcaggtgatagatgattggctatttctttacttcctatttttgcctaactagcactttagtgagctctctttactacctgattggttgggtgtgagctaaattgcatgccccgtgtttaaaggtggatgcggtcaccttcccagctaggcttagggattattagtcggcctcggacatccagctagtcctgtctctcactgtggcttgcatgcttgcacctcctgaatcatggtggtgggcccttcactgatatttaaggattaactttttttttttttcatttttgagactaagtctcactcttgtcgcccaggctggagtgcagtggtgcaatcttggctcactgcaacctccacctcatgggttcaaatgattctcctgcctcagcctcccaagtagctgggattacaggcgtgcaccaccacgcccggctaattgttgtatttttagtaaagacggggtttcaccatgttggccaggctggtctcaaactcctgacctcaagtgatccgcctgcctcagcctcccaaaatgcgcggattacaggcgtgagccacctcgcccggccaagtattaactattaactaacatctcagttccctcgttcacgctcaggctaacctctaagtgtgtccacgtgcttggcactctcctaagcacttctagtcatgcagcccactcgaggcaatattctcaagccagtgttgttgtgctccccacgttacatgtagggaaactgaggaacgagaggctaaggttaccgagacaagagttacccggccagttaagcggaggggctggggttgagaccaggcagcctctgcctccagacgtcatgccctccagggatgcgatgggatctttggtgcagtcttgagaacgagtatctccactctgcagggtggggttggggatggggagctcggagagaacacatcacgtgtccctggtcacagggcacatgtgtgtggcccggccaggggatagtcccaggtgctcaggacctgtattctaaaccgctccagtgtcctgtctcatgataacactatttcacagaggacctgggctgtggcccagacacagtaaacagcaggaggctgagcttggagggtggtgaatgtgaggctgagctggggggcagggtgaatgctggtggagggttgctgttccgccggggtgcctggaggcaggtttgtggtttcagccctaccctctcccctcccaggtggctggcctacgtcctcctgctgctcctggagctgctggtctgcctcttcaccctcctgggcctggcgaagcagagcaagtggctggtgatcgtgtaagtgcaggcagtagggggacccagtgcttgcctggcactctcctggcaggcaggacctcagtcttacaactctcctacacggaggaccgtggtccttcacggccgggtacacacgaagaaaagagagtcagagcagcccaggagggaggcggggacagacctgaaaacaggcagccctaacagtatgaagtatgctggaatcatggcagaaataatcattgtgttggcaataaagatgaggatgaggccaggcgcggtggctcacacctgtaatcccagcactttaggaggccgaggtgggtggatcatgaggtcaggagtttgagaccagcctgaccaacatggagaaaccctgtctctattaaaaatacaaaaattagctgggtgtggtggcatgcgcctgtagtcccagctactcaggaggctgaggcaggagaatcgcttgaactcaggaggtggaggttgtggtgagccaagatcacacaccattgcactccagcctgggcgacagagtgacactccatctcaaaaaaaaaaaaaaaaaaaaaaaaaggctgggcgtggtggctcacgcctgtaattccagcactttgggaggccgaggagggcggatcacgaggtcaggagttcgagaccatcctggctaacacggtgaaaccccatctctactaaaaatacaaaaattagccgggcgtggtggcgggcgcctatagtcccagctactcgggaggctgaggcaggagaatcgcttgaacccgggaggcggagcttgcagtgagctgagattgcaccactgcactccagcctgggcgacacagtgagactccatttcaaaaacaacaacaacaaaaaaaaaaaacagatgaggatgatgatctattgagggtcatgcacgctgagtccttcagttgcctccaccccatgaaggagctaccataaggctccatgtggccggtcagggacctgactaagagcgcagagggtggccaagtccaagactgagccgtccttaagtgtcgtggcaaagccgcaggaccacactgatttcacagctcgctctacgcgcccgacactcttctctgcactccctggagcacctcatgccccctgtgaggaaggtgcttccttctgcctgttttttatttctgttttttattttgagaaggtcttgctttgttgcccagactggagtgcagtggcatgatcacggctcactacagcctctgtcccctgaggctcaagtgatccccccacctcagcctccagagtagctgggaccatgggcttatgccaccactcccggctaagtttttttttttttttttttttttttttgagctgcaatttggctcttgttgtccaggctggagttcagcggcgcgatcttggctcactgcaacctctgcctcctgggttcaggcaattctcctgcttcagcctcccaagtagctgggattacaggcgtatgccaccaaacctgtctaattttgtatttttagtagagatggggtttctccatgttggtcaggatggtctcaaactcctgacctaaggtgatccgcccgcctcagcctcccaaagtgcctggattacaggcatgagccaccgtgcctggcctaagttttgtatatttttgtagagatggagtcttgctatgttgcccaggctggtctcgaactcctggcctcaagtgatcagcctgcctcagccttccaaagtactgggtttacaggcatgagctaccatgcctggcccttctccctgtttaacagagggagagactgaagatcagagaggttggaccacttgctcagggccacacagctagaagtgctagagctgggatttgaaccagacaggccattctcattggaggagtccctgcattctctctggccctggtggggtgaggcagagttgaacctgtacctccattgcccctgagagagtgggagagaccccgcgtaaggcttgcagacccataaacctagccaacacagggcaggtctgggactggaagccaggccttcagtttggggacccctgggtgcccttcttgcttactggtcaccctaccaatgctgacacgccccctgcacccctccccacccggaaagtccagagactttcagatttcagccctggcactgtctcccattctcagaggagacagggcagagccagaggctgatcaggctgtgggtggacttgggggagccttcgggggaagtgagcccagaggtgagcagtcaccgtcccagggtcctggagctgggatccaagctgcgaccacccagcccagggccctgctcataccccacaccctgctcatctgggcaggagccagatgtccagctggacatcagcagccactggcctacccccaaccactgaacttgtgtttccctaattctgatcctccaggctccagaggtgggtggaggtggggggcggctgtgatgggatttggggtgtggaaagaggctaggctaggagattaagaaccccgggctgatcctccctcccccactctaggatgacagtcatgagtctcctggttctcgtcctgagctggggctccatgggcctggaggcagccacggccgtggtgagtgccagggccgggccattgggctctgggactcagggggcctggagacttcaacttctggatctcgggatggcatggcttagtagagaaaggaattggggggcacgatcacagctctgaggtttagggcttgtttcctggggcctgagtgggtacagattggtgtcctggacgtttgagctgtaatggaggaggggctggaaacctggattcctaggtctgagggaggaggggctgggggtctggactcctgggtgtgagggaggagaagctgggggcctggactcctgagtctgagggagaaagggctggagagtctgaacccctgagtctgagggacgaggggcctggggcctggactcctgagtctgagggaagaggggctgggacctggacccctgggtggggaggggagctggggagccaggcactgggtgctgtgggagtgtggaatcggggcagttttgggtttgagccccttttctgctgcctcacgcagggcctcagtgacttctgctccaatccagacccttatgttctgaacctgacccaggaggagacagggctcagctcaggtgatttccaagggcccggtgggtccgccgggttgggcagtgcaggccctggcttcctcaggcctcctctgtgcccggtcctgcccagggtggggtgggggtgcagcctgccaggcgagacccagccctctggaagggaagcagggctcctggccactccccagctcggagccctcctggagccccgccacccgccagaccctcatcccttctgctccagctggcagcgcctctcctggtgggctggaaaagagggcaggataaagataatggtgccaggaagagagaggagggtcaggagagggtgctcctgggcgtcaggaatggggagtttggccccctggagaaaactggggagcaccatttagtcaggggttcccagggagtatagggttgcccaccagcgcctgctctggctgtggcaggagcagaagggacgcggggctggcgggtctctgaaggtaaggccatcgggctccagggctgggctgaggcccctaaccctgctaaccccccagtgcccggccttcccccgggagatccctgggggcccaggctcatggcctcctcccctctcctcctcccacttcagacatcctgagctattatctcctctgcaaccgggccgtctccaaccccttccaacaggttagggctgcgggcaggggaaacgggtgttgagggagccagaaatctggactctgaagggagggggcggggctggggctggggcctggactcctgggttccggggaggatgcaggccaggggcccgagtgctgtgtccggaggagaggagagagggccgggggcgtatactcctgggtcctcctccctccctttctctttctgcagaggctgactctgtcccagcgagctctggccaacatccactcccagctgctgggcctggagcgagaagctgtgcctcagttcccttcagcgcaggtcggtgggtgggcgctccccagacacgcggaccccacggggaaggcggacggggcgggatggagctgtggggcgtaggcggggctgcagagctaggcggggccttgggttgtgggcggggacgcagggcggggccagggcgatgggcgggcctgaagagttcgtgggaaaacgacccctcctcgccccgcagaagcctctgctgtccttggaggagactctgaatgtgacagaaggaaatttccaccagttggtggcactgctacactgccgcagcctgcacaaggtgaagcccctcccctcccaatttcttctcccacggggggcctctgtctcgacccacagaactacctcctccttctccttggacccctgccattgcgcctgaggatatctctgtatcctctgtttatatgatttatctgtcctatatctattctctacctatttataacctgtcgtctacctacctatcaagcattatccatattccttccctcctccctccctttccccccaactcccgcactccccgctgggtccccatcccaccctccccgtcccttcctgccaccttttccttccttgtcttctctcctctctccgtcctcctgcctctccctccctcctagaggctgccgcttagtgagttctggagcaagactgcctgggttccagtcctacctcctgaccaagggcaagtcacctaacttctctgtacctcagttagttccctcacttataaacctgggattgcaagagtgggcacctgtccagctcccctgcggcttgtgctgttcatacactggacaggcaggggtgggcagggtgcccaggaggaaagatatctggtgtcctgcaggctccagtttgggctctgccgcaggctgcacggccataggcaggtgagcgtggctgactctgcttcccacccgtaccgtgaggaaggacgagttttttttgtttgtttttttttcactggatggctgtgaggattgaaaaaaaaaatccccttataaaacagtaggagctggccgggcgcggaggctcacacctgtaatcccagcactttgggaggcccaggcgggtggatcacctgaggtcaggagttcaagaccagtctggccaacatggtgataccccgtctctactaaaaatagaaaaagttagccgggcatggtggtgggcgcctataatcccaactactcgggaggctgaggcaggagaatcgcttgaatccacgaggcagaggttgcagtgagccaagattgtgccactgcactccagcctgggcaacaagagcgaaactctgtcacaaacaaacaaacaaaaccagtaagagctgttctaaaacacacacccgaggatgcctttccccggccagtcttcccatcaaagacctcacatgtgcatagcttcaccaagtacctgaccctgttgcatttcacaggtggtaactcatcgatgcctcataacaatgctatgaagaaggaactatgattatcccacctaacaggttagaagatgaggagcagagttgagggaccttcccaaggtcacacggccagccagcccatgcacactgaggagagagggaccttccggagggccccgccctctgccccccacagccaggcagttgcccagttttgtcctttctgcttctggaatgtcttcatccatctactctcaatgcccaatgcccctgccgcagctgaggcctcgttctctcccctgcagaaggaagcatggccccctccccatccatccccccatggaccctagaatagggctgccagattcagcaaacagcaaaccactctgctataagtacgcccggtgcaatgctggggagatacttatactagaaaattatgtattgggcatccgatactcaaatgtaactggaagtcctgaatttgatctggcaaccctacccaagagggatttgtctacgccatcgcatggatctgagctttccctggtctggctcagacagaccccttctgtggctcccactgcctcccacccttctggaactggcattccaaaaagggagtggggagtaagcactgaagccatgctcagaattgctgactattgagctgagaaaggctgggcccccacccagcccagggctgccctgatcttttgcataaggataaactggggttcaggcgcttttctgtggcctaggcagaaactgggctggaatacaggcccccagactcctttgtggagggagggaagggaaggaagaggacagatcactctacccttccctaccactgcaccatgagaccctgggtctccatctcccctgtcagtgtg[133 bp omitted]cagcatggcgaaatcccatctctactaaaaatacaaaaaaactagccgggcgtggtggcacacccctgtattcctagctactcaggaggctgaggcacgagaattgcttgaacctgggcagtggaggttgcagtgagctgagatcgagccactgcactccagccggggtgacagagcgagaatccgtctcaaaaaaaaaaaaaaaaataggagggggctagggatgggtgcctcgtgcctataaacccagcactttgggaggcccagtggggcagatcagaactccttgagctcaggagttcaagaccagcctggccaacatggtgaaaccccatctctattaaaaaaaaaaaaatcaacaataagggacatcagggatgaggatgaaggagggagggcactggagcctaagagaatcagctccaatatcgcttctgccccttccagacagtgtgactctgggcaagtagcttgccttctctgggctgcaacttctttccaccattgcaagaggcggcagcgtgagagggtcagtgtctgcctggcagggctgttgtgaggatgaaggacagtgtgcatgtaccaatactctcaaaacagagcctccattgccccgacaggtccgtaccccaaccctcactggcttagtaacagacaccccacctcaaccaggtgctcctgccagaaactcaggctcttagctcccacaaccattctcagaacaagttctgttggcccttcctctgaaacctatatggactcccaccgctgttcctaccaccattgctgtgccctggtccccgcatcctagccaccatgaccacaggggcctcttccctgtcccccctcgcctacccccgtctgtcctccatgcagcagccagccagccaggtgatccttttaaaacacaatccgatcaagttcttcctctgcttaaaacgctcagtgattcccctcagacatggattaaaatccctgttcctcgccctgacctacaagggcctgggtggtcagtcctggatctgtctgcctctggcctcagcccctcccagcttcctctgcacagccctctgcctggctccttcctggaggacccatccctgctagtggggttacccgacctacccctgccctgcactgacccccgccctcctacctcgttgcacaccagcctctgagatgaccttctcggtcctgtttaccgaagtttcctggtactgggggcagcgcctggggcagagcaggctctgtcaacccccactgaatacatacgctgtgcaggtgcttagcactcggtgaaggccgtttctgctgatttcttgggacgacagtcatcagagccagcatttgttggcatgttgagtgtgtattgtgtgcgcggtgtcatcttgagccactggttggtttttcgacgtgctgttccacgtgctctaggccagtgattctgcccccagggacacctggctgggtgaggagttctgcccccagggacacctggccgggtgccgagttgctgttggttgtcacactgcaggagggggtgctcctggcatctggtgggtggagctgagtggggctgctcagcaccccacaacacacagggcagcgccgtcaccacagagaatgatctggctcaaaatgtcagcagggcccaggttatgaagccctcgcccctggaccaaggcggagctggcggtggctggcctgtgggcgcttggtgcaggggaggatgctcttgcaggaggtgccgctgccgggagggagaagggaaacggaagtagcagttctcacgttcctgggtagatgaagatggaggagagggcccagggctggtgggagatgctggactggttctagatgtggggtgctgactggggaggacccatgtgaaagggagataggggcctgcaatgacaagggcgggtgcagctcaggagaagccaagtctggaggctgggcaattaattcctgagtgccaggcctatcacaccaaagaccccactgtacccactgtattctcagaactgccctttgacaggggaaactgaggcacagagtggtcagttgacgtgtgcagtaccacagccgggaggacggtcagactgatgtgcacagtgtgtgccgatgggggagggggtggggacgcatggcctgatgacgccctcccctcaggactatggtgcagccctgcggggcctgtgcgaagacgccctggaaggcctgctcttcctgctactcttctccctgctgtctgcaggagcgctggccactgccctctgcagcctgccccgagcctgggccctcttcccacccaggtcaggagcgggggagggtagggtcctggggagggaagaggaggggcagcacctggggaccacggtggcagtgggggtggggggtgcagcctcctgatgggtccccatcccgcctctctgccatgccccgcatcaaaccccagtgacgactacgatgacacagacgatgacgaccctttcaaccctcaggtactggatgcctgggtctgagggaggaggggcggggggtcctgaactcctgggtctgagggaggaggagctgagggcctggccgcctgggtctgagggaggaggggctggggcccggactcctgggtctgagggaggaggggctggggtcccacagtacaaagccaattcccactccattccctcctctcccccgctaccccgaatctcctagcaggaatccaagcgctttgtgcagtggcagtcgtctatctgagcccctcctcccggctggactggagcctggctcccctcttcggtgagcttccaagggccaccccagctcctgcagccgggcctctgcccccctcccgccctccgagctgctccaggcatgggctgcgtgcctcctgctgggtggatcgcaccgggcaggccctccagcctgcatcactgccctgtctctccctctctccgcagttccttccctggctgccggaggagaccccactaacccagcctgcctgggctctgaccactaacactcttggccatggacagcctgcacaggaccgcctccctgctcttggccactgtgctcccatttctgtccttggccttgggagtagctgagggggcagactagggagtagggctggcaggggagggggcagacagcctcgcctcgcacccttcatccctggctgccggtcccatccttggagggactaagctgggggtgggggacatgagtccccctgctgcccctgccacatcccagtgggctctgaccccctgatctcaactcgtggcactaacttggaaaagggttgatttaaaataaaagggaagactattttacaagcagctgggtcctccttatttctcctctcccttgattcggcctcctggccagggctgggacatcctccctgctgtcctctctcccccggcctcccagctgccaggaatttctgcgcctgtccaggctcagcaaggggtccaaagacattgttctttaaaaaaaaaaaaaaaaaaatcaaaaaacaaaacgctttcttctgattctaaaagtaatgcgcgtgtcctgacacaggaagacacaggcatctctggcacagaatagatggcctagaaatagatctaactgtgtgtgtgtgtgtgtgtgtgtgtatatatatatatacacacatgacagaagacagatttcaagtcagtgtggaaaggacggttggtttagcagcagtagtgacatatcggctctccatctggccaaaaacttctatagataagatgggtggaagatctagatgtatgcaagtaaaggcacagaagaatttctagagaaattaggagggtgggcatggtggtgcatgcctgtggttccagctactcgggaggctgagactccttgcttgagcccgtttcgaggtagcagtgagctgtgatcgtgccactgcactccagcctgggcaacagagcaagaccctgcctctttttttttttttttttttgtttttgagacggagtctcgctctgtcacccaggttggagtgcagtggcgcgatctcggctcactgcaagctccgcctcccaggttcatgccattctcctgcctcagcctcccaagtagctgggactacaggcgcccgccaacacgtccggctaattttttgtatttttagtagaaacggggtttcaccgtgttagccaagatggtctcgatctcctgacctcgtgatccgcccgtctcggcctcccaaagtgctgggaatacaggcgtgagccaccgcgcccggccaagaccctgcctcttaaaaaaaaaaaaaaaaaaagacaaaaaacagagagaggctggctgcggtggctcatgactgtaatcccagcattttgagaggccaaggtgggtggatcccttgaggccaggagtttgagagcagagtggccaacatggtgaaaccccgtctctacttaaagaaaaaaaaaattagctgggcatggtggcacaggtctgtaagcccagctactcgggaggctgaggcaggagaattgcttgaacccgggaggtggaggttgcaccactgtactccagcctgggagatcaagtgagactccatctcagaaaaaaacaaaacaaaacaaaacaaaccagagaaattaggagaatatttgtatattgtctgcatgtcatgtatctgggtagggaaaatggggagggaggagtttaagcaggagatcataaaaccagaaaggaaaagatagcttagttggcaaattatagattgaaaaacataccgtaaagtcaaatggcaaattgacagactggggaacagtgagtgtgtgcgtgcgtgtgtgtgtgtgtgtgtgtgtgtgtgtgtgtgtgtgtatgttaacagttatgatgcagaaatgttattcttaaaagatataatctacaaaagctttcataaactaagaaaaagacaacccatttaaaagtaatcaattgagttgaatactcaataaaaattccaacatcagtaaacagacaaaaagattcaaactctaataattgggaaatgcaatttgaaagaatgagaaactacactttttcactacctagacacaatgaaattaacaagagtggtgatgtcctgggcgggcgaggacctagaggaacaggcactcaaaacacttctcctgaggctgtgagctgccaccatcccttgaaaaaaaaaaaaaatgcgcttgtatgtgatcagatcaaaactgcatacaccccatgccccaacaatcctgcttttgggaattgatttacagaaaaagacacacaggcttctgaagacttctatttagagctgcctgttacaacgataccactttgatcagctaaaccctgaaaacaaacatgcacaaaaagagaagtccaataactgactgcacagcagggctctctggaagaaaccagctcttggctgagttgaggatgtgagggaaaagcctggcagagaggagctatcagagcagggtgtggcagacagcagtggcagagtggactgaaggagaggggcctgcacagtgaagggcccagcttatcattcaaggcaccccaggccaccatcctggccctgcttttcatgaccttcacggatatgggaaagtcacttgacccgttagacctcggttgcctctttgatcaaacgggtatcagaaatccaaaattccaaaatccacagatccaaagagctccaaagtcaagccatccccaagctcattgggcaggaaaacctgacctgtgttggtgggagatgacttacagacatgactgacacgcttggtgtgaacgttcacatacttccctgcagaaaagttaaccaggctgctgcacactgctgtgctgagcactgagggtgccgtgtgccctgtggagtagagatcatattgcctttgcaactgaaaaatcctgaatctcaacacacacctggctccgaggggatcgagttggtgcttggtgacccacagtgccagatgctggtgtacagcgtggggcctgctgctgctctgtgcctgtcaatcatttctattttgtgtactgcaaggagcgttcagaggaagctttagatatgtgggcctgacggtgggaataaaaatcaactgcaatttcagggaggggttctgggggccacatgcgttcactcactttttcctaaccatgtgggctgtctgccccaggcccggccctgctgctatgctgacttctttcctctcaaacactgccctctagtgcccctgagcccatttcccaagcacaggcatccgctggctgttgggcggctgcaaagtaccttgagactcagctgcttgatctcccatgccaatgagcctgggggtgatctctcaacaagaagttggccgggcaccctggctcacgcctgtaatcccagcactgtgggaggctggggcaggcgatcacctgaggtcaggagtttgagaccagcctggccaacacggtgaaaccccatctctactaaacacaaaaattagccgggcatggtggcgggcgcctgcaatcccagctactcaggaggc[137 bp omitted]aactttacaaaaggaaaatccagtgttatttttagaatgttacctatgggggcttccactgcgaccaggatggagtcacagagactggacttgaccccccaaaaatagagtaaatacaagaaaacaacagtggtcaagactctaccaagaaagtgatccctgaggaacgggaaacatcaaggcaagccctaaaattgccgctgggtcctgttgcaagtttctagaccacgggacagggagggaagactgaggcggagctgggaggactccgtgagcagaggagacaaagcagggagtctga[133 bp omitted]aacatggtgaaaccctgtctctactaaatatatacaaattcgccgggtgtagtggtgggtgcctgtagtcccagctactcgggagcctgaggcaggggaatctcttgaacctgggaggcgaaggttgcagtgagccaagatcgcgccattgcactccagcctgggcagcagagcgagactccatctcaaaaaataaataaataaaaataaaaataaattatcttggacttccagcctccagaactgtgagaaataagtgtttgttgtttttgagccaccagtccatggtcctctgttactgcagactagaatgccagggaaagaaccacctggagggactgaagcaaatagcgcctgagttctggggactcacacaggccttgacaaggcgctgttcctgccagaagaacctcataactgaaggaacactgggtagaacacggagagggtcttacatcagccgtggggaataagcagccctaacctgttaaacactgttctggtcctgcctgaggaatcttaaaagcaaaacctgaaaggatcaagctgcttccaagtaaggtgactgcattctcaaacaaagctcaagaatatttataggcatacaaaagtaacgagtgctcgacaaggtaatactgatattgtctagtatccaacaacaaagtcaccaaatatgcaaaaagcaggaaaatagggcacatcatgaggataaaaatcattcaactgaaacggacccaggagttagaattagtaggtaagaacattagaacaactattatactgtactccatacgttccaaaagttctttacagatacggaagatataaaaaaactcaaactggatatcaacagatagaaattacaatgtctgaaataaataatgtactggctggaacagcagatttttgttttttgggggagagtcttgctctgttgcccaggctgtagtgcagtggcatgatctaggctcactgcaacttccacctcccaggttcaagcaattctcatgcctcagcctcccaagtagctgagactacaggcacctgccaccacatccagctaatttttgtatttttagtagagacgggctttc[132 bp omitted]aaaaaaaaaaatctggaagacaacattagaaactgtccaaatgaaacatttaaaaaaatgatttttttttttttactttttagacagggtctcactctgtcacctaggctggagtgcactggcgtgatcatgactcactgcagcctcaacctctccagctcaagcgatcctcccactttagcctctcgagtagctgggactacaggcgcacaccaccatgtttggctaatctttaaaaattttctgtagagatgaggtctcaccatgttgcccagggtggtctcaaactcctgggctcaagtgatcctactgccttggcctcccaaagtgctgggattacaggcatgagccaccatgccctgccccagaaggaatgaatatatttttttttaatgaaaagaacactggtgagctgtgggacattttaatatatgtgtaactggaggcccataaggagagagaaagaaaggaacagagagagtgtttaaagaaataataaccccaaatttcccaaatttgatacaaactataaaaccaaagatacaagaaactcaacacaccccaagcagaagaaacacaaagataaaccaagatacatcataatcaaatttcttaagaccagtaacaaagagaaaatcttgacaacagccagatgaaaaacaaaaagattttataaacagaggaacaaaaattaggatgacaccagatttctcactggaaacaatgtgagaaagcagtgtaagaaaattcttaaagtagcaaaagaaaaaagtagtcaacc[220 bp omitted]gaggcaggagaatggcgtgaacccgggaggcggagcttgcagtgagccgagatcgcgccactgcactccagactgggcgacagagcaagactccctctcaaaaaaaaaaccaaaaaaacaaaagtgaagacaaggccaggcgcagtggctcacacctgtaatcccagcattttgggaggctgaggcaggcgtatcacctgaggtcaggagttcgagaccagcctggccaacatggtgaaaccccgtctctaccaaaaaatacaaaaattagctgggtgtggtggtgggcacagagcagagatagaacagtatcataaggctgggcgtggtggctcacacctgtaatcccagcactttgggaggccaaggcaggcagatcccgaggtcaggagtttgagaccagcctagccaatatagtgaaaccctgtctctactaaaaatgcaaaaaggagctgggtgtggtggtgcacgcctgtaatcccagctacttgggaggctgaggcagtagaactgcttgaacctgggaggagtaggctgcagtgagtcgagactgtgccactgcactccagcctgcatgacagtgagactccgtctaaaaaaaaaaaaaaggtatcataaaaaatgctcaaacttccaaacttctctccacaaatggtgctagaacaactggacatcaacatgccaaaaataaataaatcaaatctatacacagaccttagtctcttcacaaaaattaactcaaaatggatcatagagctgaatgttaaatgcaaatctataaaactcctagaagataacataggagaaaacctacatgactgggttttgtgaatttttttttttgagacaagagtctcactctgtcgcccaggctggagtgcactggcagaatcttggctcactgcaacctctgcctcctgggttcaagtgattctcatgcctcagcctcctgagtagctggaattacaggtgtgcgccaccacgcccggctaatttttgtatttttagtagagatggggttttgccacgttggccaggctggtctcaaactcctggcctcaagtgatccactcacctcggcttcccaaaatactgggatgacagctgtgagccaccacgcccagccgtgataatttttttgatacatcaaaggcatgatccatgaaagaaacttacaagcttgactttattaaaataataataaaaaaacccctctgctaggccaggcgtggtg[131 bp omitted]gtggcaggtgcctgtagtcccagctactcaggaggctgaggcaggagaatggcgtgaacccgggaggcggagcttgcagtgagccaagatcacgccactgcactccagactgggcgacagagcgagactccatctcaaaaaacaaaacaaaacaaaaccctctgctctttgaaaaacatttttaatataatgagaaaagctgcagcctgggagaaactatttgcaagagacctatctcatgaaggactgctatccaagatttacaaagggctcttaaaactcagttaacaggaaaacaatctgattaaaaaataggaaaaggggccaggcatggtggcttacacctgtaatcccagcactttgggaggccaagacgggcaggaatttgagaccagcctggccaatatggtgaaaccctgtctgtactaaaaatacaaaaattagccagcatgatggcacgtgcctgtagtcccagctactcgggaggctgaggcagaagaattgcttgaacccgggaggcggaggttggagtgagccgagatggtgccactgcactccaacctgggtgacagagtgagactcggtctcaaaaaaaaaaaaaaaaaaaaaaaaaaaaaaaaaaaaaaaaaggattgtttctgggtgtgtctgtgagggtgttgccagggaggctgacacttgagtgagtggacggggagagggagacccactctcagtgtgggtgggcaccatccagtcagcgcagaaggtgggaggggctggcttgctgagtcttctggctttcatctttctcctgtgctggatacttcctgtctttggagattagactccaggttctttggcctttggactcttgaacttccaccagtggtttgtcggggactcttaggccttccgccacagactgaaggctgcgccgttggcttccctacttttgaggcttttggactttgagacgtgactggcttcttccttcctcagcttgcagatggactatagtgggactttgcctgatgatcctgtcagccagttctccctaatatactccctttcaatatatacatatatcctgttagttctggccctctggagaaccctaatacagatggcaaataaacacaggaaaagatgttcaccgtatgtcattagggaaccgtccgttaaaacaagacaccactggccgggcgcgggggctcacacctgtaatcccagcactttggaaggccaaggcaggtggatcacgaggtcaagagatcgagatcatcctggccaacatggtgaaaccccgtttctactaaaaatacaaaaattagctgggcgtggtggcgcacgcctgtagtcccagctactcgggaggctgaggcaggagaatcgcttgaacccaggaggcggaggttgcagtgagccgagaccatgccactgcactctagcctggaagacagagtgagactctgtctcaaaaaaacaaaaaaaaaacaagacaccactacatacctattagaatgccaaatccaaaatgctggcaccaccaaatgctggcagaaatgtggagcaacagaaacccttcttcattggtgctggcaatgcagaatggtacagctactttggaggacagtgtggtggtctctcataatcctaaacatactcttagaatatgaaccagcaacactgctccccagtatttacacagatgggttgaaaacttctgcccacaaagaaatctgcacgtgcacgtttatggcagctttctttatcactgccaaaaacttggaaggaaccaagatatccttcaataaatgtcttactacattctggttgttgtaacaaaataccatacactgcgtagctgaggcaggaggatcacttgagcctgggaggttgaagctgctgtgggctgagacagagatcacatcattgcactccagcctgggtgacagaatgagaaaccctgtctcaaaaaaaaaaaaaaagtacagttttggtttttgctgtgactgggctcctggagtgagagctctggatcccagctgcaagatgaggaatctggagccgagagaagggaaacgagttttccaagtcatacggctggttaagtaaaagagccgggattatgacttaggtttcctgccccccaagattattattttttgaaacagagtttcgctctgtctcccaggctggagtgcaatggcatgatctgggctcactgcaacctccacccccagggttctagcgattctcctgcctcagcctcatgagtaactgggattacaggcatgcgccaccatgcccggctaatttttctgtatttttagtagagacggggtttcgccatgttggccaggctggtcttgaactcctgacctcaggtgatccacacgcctcggcctcccaaagtgctaggatcacacgcatgagccaccgcgcctggcctacccaagattattaaaataagttttcagaagcaaccccctactggccaggcgcagtggctcatgcctgtaatcccggcactttgggaggcagaggcgggcgggtcacctgaggtccggaattccagatactgtgaaaccctgtcttcactaaaaatacaaaaattagctgggtgtggtggtgcacgcctgtaaagagaattgcttgaacctgggaggcaaaggttgcagtgagctgagatcgtgctactgcactccagcctgggcgacagagccgtctcaaaaaataataataataatagattttttaagaaaagcaatcccctagtgacttcttagagcacatcatcagacagttggggtaaaattctgaagtggattaagggaggggtgctggtttgcctggatggctacatgaacatagccctggaaccaaccaaatatgtaactggacaacagaaaaataagtacagggtgcattaatcagaggcaacaatgttttgtacttaagtacacagaagacacgatgtgaagacaccaagagaacagtacttttcatggttagacacatttcttaggtattttttctactttgggattcttttgtgatataatttgtcctgtttacataatttttttccctgacatgtaagataaatgtatctaattgtgggcttacttgtaaagagttttcacatttaagttccagtcatttcattttatcgctgtatctgtgtacagaatgctaaagaataagacataaaaaataaaagtacagttataaacacctcttttaaaaggcagagactgttcgcttgggcaaaaaaaagcaagatccaactacatgctatctacaagaaacccaccctaaatacaacaggtaaaaggaagctaaatggaacgtgggtcctggcttgtaccctggcatgtaaagaaaacattggaggaaaaggtggtgaaatcccagtaaagtctgggttttagttacagtaatgcatcatgtcagtatctacaacaaaccacttttgttggtgcttgtgatgacagcatcagaagaaagtgggcataaaacatggtggactgcttatgatctttgcaacttttcttttttttttttttgagacaagaatttcactcttgttgcccaggctggagtgc[132 bp omitted]agacgggacttcaccatgttggccaggctgatcttgaactcctgaccccaggtgatccacccatctcggcctcccaaagtgttgggattacaggcgtgagccagcgcgcccggtctttgcaacgttttgaataaatccaaaattattccagaacaaaaagcttagtaccaaaaagaaaacaaaaacaaaaacaaaacaaacccccccccccccacagagtaaaataacggaaaaagatctactatgctagcactaacaaaataatacgtagttatgaaaatggtatgtatttttcaagctagacgttcataatggtagaacatgaggaggaaaactgcctcttaaatcccaccacttactgtgacacagtgaccggtccctgcagcggactggatagttgtatcagagtcctggacggaaacagatggcactcaaaaggtggcgcgcagttcagagaaatgcctatgtacggatttggtccaatgcctcagcctgacctcagggaccttcgggggtctgctccgcgcccacccttacacatctgtgaccccacacacttccaccccagcgccactgccaacagctacacccatccccctccaaccgcgtcagcttccagcctcggtccatctgaactcgccgtgccccctcccctgcgcccttccagattcatttgctagggaagcccgctcttccgggtggagctgttcctcatcccctttctttatcattctctccccagggcttccacatcaccgtgctgtggacaatcccggaactcctgtcacgccagtttacatttaggaacagtaatggctcccactgactcagtcaaaacaaggctgcggccgggcacggtggctcacgcccgtaatcccagcactttgggaagccgagacggagggatcacgaggtcaggagttcgagaacagcctggccgacatggtgaaaccccgtctttactaaaaacacaaaaattagccgggcatagtggcgcgcgcctgtaatcccagctactccggaggctgaggcagaattgtttgaacccaggaggcggaggttgcagtgagcagagatcacgccactgtactctatcgtgggcgacgacagagcaagagcaagactccgtctccgagaacaacaacaacagcaacaagaaaacaacaataaaaaaaataaggctgcgtgggaggcagaaagagctaatgcggccacgcttgtctcctcggggccaccgtccccacccagacttccggtctgccttaaaatgttcatgcgtaagtgcgtgggcaggaaggcgggctcaagcgcagctcgtggcgttcattggctgtgcagggccgagggaggcggtgcaaggccgccgcgtgacgtcaggacgccgcggtcaggacgtcgaagccaaagaagaccagagccagccgggtggcacagcggtgtcgtggccgtgttgctgatcgcctgggtggttgttggcgtgtccctgcagcgaaggatcctggttggtaaggggagcggcaggcgagcaggcgggcggggatagcatctccttttggtcttgcgccccgcgagccccgaggccttctcggccgtcgcagcagcagacgccgcgcgcgagcgtcgacagggtgtggcggcgcaggggcagccactgcgcctgcgcaccgggcctggggccgcgcgttcgggcactagcgcgcgtgcgccgtcgtcttctaatttccgttcctctcccttggagttctcggggccccggggcgcccctcactcgccgttgaccgggtgttgccccgggcgacgggcggctcctgcgcgtctttctggggcgtggtgcgcaggcgcggcctgggcagtggctccgtggctagtcgtggggatccgagcggcctcctccacccggcgtcctcctttgccttcgcccagcctgcgggacggccaggtgctcccgggacctcaggcctcgcgtctgatgcctgtctctgttcttgagacccgtccgggagtcctctgtccagcccccaactcctgaccttacctctaatctcccttctgccctggggctcctcttcctgtgtccccgccacgatccctcgtctccacccacgccctgtgtcctgtttaagttaagcctttgcgtttctagggcttttccccagctccagactcccgttcctatcccgtcaactcgtgggaattccggttctcctgcgggattaattatcctacttatcagttactccctctcgggagtttaggctcctgaatccttgctccggagacactccacttttcttccaattctctctgtaccccactcttaattcgttgaacatgttttgggtcttctttggcattcccaaagctttatgtccagacacccaaccacggtgatcccttttctctcccagccctacccctgcttccgggaacctcccgtggaagcaggcaggggtagtcccactgaggactcccacgtaggtctctttactgcccttcggagacctttttgaaatcagtctgtcagtgctaagaacccatttcttcacgttggggttcacgttggcattctcaggaacgctcaacgaccacttgcttccagggttaacttccggaaaatccccttttcctctcaaaattttcttctcttctccaatattcttccagccccctcgatgctccctgaaaggcctcccttttcacagagttctcggaaacctttccaccctctcagccttaagggttccctcagactcttctcattat[131 bp omitted]gccctccgcctcccgtgttcaagcgattctcctgcctcggcctccctagtagctgggattacaggcatatgccaccatgcccagctaatttggtatttttagtagagacgtggttactccatgttggtt[133 bp omitted]cctaccctctggacctttcatcacagcctctctttgctcacatgggtttcagacccttctccttccctttgggaagtctgctctggcttccctgtttccaaatccttcgttttccacctggagctctacaaaggggccaggggcttcccctcactccagcctttctagtccacacccagaactcttcagatccttgaccccagtggcttttcagtcagcctccccttttctgcccggcttctcttgagtccatctacttttcttccccactttgtgacgtgtttttagctcccccttaagtctccctaactcattctttttctcatagacagtgaaaaagcagtctggctcccgaggtccaccccttataccccaaggtccagatggcggccaacgtgggtgatcaacgtagcacagattggttagtgaggcgagagggatggaggccagtcgggagggaaagaggaagcaagacccagtgctgtcctctggggtgggacctcccgtggccttaggggaggtgatgccacaatccctgtgggtgggggtggtggtgaggcaaacacagagggaagcatttggttgtggtgtggagaggggcaagctttcacctctctgagctttcgtttttcacagtacagcgcttgctttgcagaattgtgatgattcattcaagcaagtgtaattaggaggcagcttcccaacactcaatacacagtcatttatttgtttttctgctgattccttattttttctcaaaatagtgtgataacctgccgactggggtgatgtcagacagaattcattgattcatgaaagacatagccctaggaggtgccaaggcctgtgttcagttctgtgggttctgttaattgttttgtttgtttggttttaacaactgctgtgtgccaggctctgggataagtaccttaagtaggtgatctcatttatccctcccagcagactctgaagcagaaaccctttatcagcatagtacagattagaaaacttaggcttagactggtagtaacagttagatatgggatccaggggctggaatttgcctcccaacttgcccacctgtgtacagtggggagaacaggtgtgacttgatgtcctctctctctgcaggtcttctcagtacagcatggtggctggggcaggccgagagaatggcatggagacgccgatgcacgagaacccggagtgggagaaggcccgtcaggccctggccagcatcagcaagtcaggagctgccggcggctctgccaagtccagcagcaatgggcctgtggccagtgcacaggtgagaaggcctcatggggctggggtaccctgagccagaggttgtgggagggacacagtctggcgtcctgttgtatcattcagacggggtgctctgaggggaaacatgaaaagacgttccagggtatctaaatctgaacgggaaaaagttctgtttccttgaggaaattagggcgtgatgtggttctgaagagggaggccatgcccatgcccctggtctctaacgtgcgtgagtctcatggtagagacagtggctcactttgcagatacatggacccagtttcatcccttggcaattggccaccagtaaacaggcttgccctttgggggccgtgtgcctgtggatttgggctgctgacggcacatgtgcctctgcttccacagtacgtgtcccaggcagaagcctcagctttgcagcagcagcagtactaccagtggtaccagcagtacaactatgcctacccctacagctactactatcccatggtgagtgcccagccagtggggcggggcagggcgaggtggagtctgctgggtcggggcgaggtgaagtggagtctgccgggatggggctgggtggtggatggactggagatcgcagtgataactgctcagaaaccctctaacttgcccaggaggtaaattcctaggtccccgccatgagccacaaggtcctacatacccggttctggtcccttctctcctcatgctcattctgccatggccatcgaagcagagacctccttgatgcccgcacccgccaggcccgctctcgctttgccctggctgcagtgctccctgtgttgccgcctcttggaggtctctgctcagatgccgccttcagagagcctctacctgacacactgattgaaagtagcattcctgcctcgcagcctgtccctctccctttctttgccatcttattgtttcatgatccttattgctggatgtattacatgttgatgtctccagccggacatgtaattccagcacaagcttcattacagcatgggttttccttttgttctgtcgtagtgcttagaagagttggcactcagtatcgttgattatattcttccgagaactagctaagtgagatgtgggattgatagaggtttttcttttcctaatatatgagaggatgtggtgcattaatatagtgaagagagaaaggggtgagggattggtagagggtcatggctggtgtagttcctgagcaggctggggaagcggaaagggtaggcctcccactaaaccctccctccctgcgcctttgcagagcatgtaccagagctatggctccccttcccagtatgggatggccggctcctatggctcagccacaccccagcagccatccgcaccccaacaccaagggactctgaaccaggtaacatcctagcccagctcccataccctgctcaagcagaggaagtgtagatttttgaatgagctgtcaatgaggaatggcttgtactccttaagctgcttttttccttccaagcaactcctgatctgaaaatgaggaggacagagcatagtgtttgaacctggggtgggtttaaggctgagccaaggccagggctgagatgttgaaagacatctcatctttttccctagcatggtcacccacaggcgtgcacacaccggctgggttttgcattgaatgtgcagcttggaggaatggccgggctagtgcacaggaggcaggtagacctgggtttgaatcccagctgtcccacccctggtgtaattacgcatctcggtcagctctcgaaagcgggaaggatggtagcctcatccttgggctccatgagtgtgtgtgctcatgggtgtcttgtgctcagatggtagcgctggagtgggtgtgttgtcggtggctgttactccagcattgaaacgctgccagctgccgcttcatagcttagggccctgggaagtcgcttagtctctgagctggagccttgtcagctgtgaaaagggctgttaacaaatgttaacctcacagagttactgaggactcgaatgaactcacatttgggaaggtcacgggagggttgagtgctgagtgctgtgaccactgcgtcctcacagcgagggctgagtgccactcgccagccccagaatctgcctcccgtgctcagcgcctgcttccttctgcagcccccagtccccggcatggatgagagcatgtcctaccaggctccccctcagcagctgccgtcggctcagccccctcagccctcaaatcccccacatggggctcacacgctgaacagtggccctcagcctgggacagctccagccacacagcacagccaggcggggcccgccacgggccaggcctatgggccacacacctacaccgaacctgccaagcccaagaagggccaacagctgtggaaccgcatgaaacgtaagttggcagagctacgtggaggtccgagcggttgggccctcataagagctcctgggtgtgaggcccgtggtgtgtgctgctccttgtttctgggtgttgtgatcgccaggctgggggtggggctgctctggaccaggcacatgtgtgctggagccctcctctagaacctgagcgctcctccctgcatttccacttcctcccgtcccctggggacccctggatgtgccggggaagggcctaaccatagctttcgctgccctcacagccgcccctgggactggaggtctcaagttcaacatccagaagcgaccctttgctgttaccacccagagctttggctccaacgcagagggccagcacagtggttttggcccccagcccaaccctgagaaagttcagaaccacaggtgacgtctgcccccttgccccgtcgcagccccacactctgcactcagcgtctatggtccagtcccactggccagctgcccaccctgagcctcagtgtgcgcctctgaaaagggcagaaggaccctctcttgggggttgctgtgagcactgaaggagacagaaggaaaacttggggactgcgtcccgctgtgtcagctcagagtggcggtggggatggtcttttgagtttgggatcgtctccagctgagcccctcatctgtcctcccgcagcgggtcctctgcccgggggaacctgtctgggaagccggatgactggccccaggacatgaaagagtatgtggagcgctgcttcaccgcctgtgagtcggaggaggacaaggaccgcacggaaaagctgctcaaggaggtgctgcaggcgcggctgcaggacggctcggcctataccattgactggagccgggagcccttgccggggttagtctgggtgggggacataggtgggagggtggtgctgtgagaggcatgggctgggtatggaggtaggagagttgcgggtcccaggtaccaggagctccaaagagaaatgaactggaaagttggatcctggggggatgaagtcctggttggagggaggccggtggggtggggtggggaccatgggtgctggagaggcgtgcattgctcagtggttaagcgcaccctctggagacggaaaacctgggttcgcgtctcatttctgcactgtagtagctgagccgcctggggtaagtgcctttcctttcggaggcgggtcggtaccttgagggaggtggtggcggctgtcctgccagtgtctggcggggttggtgacgccctgccctgctgtattctcaggctgacccgggagcctgtggctgagagccctaagaagaagcggtgggaggccgctagcagccttcaccctcctagaggggcaggctcggcgacaaggggcgggggtgccccgtcccagcgagggacgcccggggctgggggtgccggtcgagcccggggcaacagcttcaccaagtttggcaaccgcaacgtcttcatgaaggacaacagctcttcttccagcacagactcccgctcccgctcctcctccaggtccccgacgcgccacttccgcagaaggtactgaggctcccggctggggctgtgtgtgagggagggggaggcgtttcaggcctgaccctcctgcttcttcctgcagtgactcccactcagactccgacagctcctactcagggaatgagtgtcaccctgtgggccgcaggaacccgccccctaagggccggggcggtcgaggggcccatatggatcggggccgaggcagggcgcagcgtgggaagaggtgagactgtgtgagggctcgacacacgggccagggtggaggagggtactggggacccatgggagaaggaggaggagggccggacaggtggacagccagctgccaaaggggcgaggctgaaggggggctggagacgcctgtcgcgctcactgcccctcatcccttcctaggcacgatctggcgcccaccaagcgcagtcgaaagaagatggcggcgctggagtgtgaggacccggagcgagagctgaagaagcagaagcgggcagcccgcttccagcacggacactcccgccgcctgcgcctcgagcccctggtgctgcagatgagcagcctggagagcagtggggctgaccctgactggcaggagctgcagatcgtgggcacctgccctgacatcaccaagcactacctgcgcctcacctgtgcccccgacccgtccaccgtgcgccctgtggcagtaagtgcccagcagggcagttctgctctgtgaggccgtgctggctcaggacttggggagccaacccagggagggtggcagaggccacacgggggctctggtatggcaggggaagctcggccagagacgcctcggctggtcggcattctgagaggagcgcaaaggcgctctgctgccctggagccccgcgtggcgggtgtgcagcttggccggcgaatcgcttgacctctgggccgtggttcctggcttaggtgacacggagcataaagccttctcccaggcccgtgggctgtggggcgtggggggctgtgtttccagtgtttggcgtagtcactgttctgctgcagaacctgtgaacagccatgtgcttatagggaaatgggtgtggaggtggccactcttaacccatgtcttgtgggtttgttttctctttttttgggagagagtctggctctgtcgcccaagctggagtgcaatggcgtgatcttggctcaccgcagcctccgctccccggcttcaagcgattctcctgcctc[222 bp omitted]taagtggaagccgttggccacgctacctgagttgtactccgagtgtgaattcagttccctttttcaggttttgaaaaagtcgctgtgcatggtcaagtgccactggaaagagaagcaggactacgcgtttgcctgcgagcagatgaagtcgatccggcaggatctgacggtgagactcgcgctgggaggggcctggcctcagccagtcctgcctcccgctccttgtgactcttgttctcgccccgctgccccaggtgcagggcatccgcaccgagttcacggtggaggtgtacgagacccatgcccggatcgccttggagaaggtgagctggcctctgcgggcctccccagcccctttcctgctgccgttctgccctcagcaccctcactctgctctcctccctcggtgcctctgccttccagggtgaccatgaagagtttaaccagtgccagacgcagctcaagtcgctgtacgccgagaacttgcctggcaatgtgggcgagtttactgcctaccgaatcctctactacatcttcaccaagaactcgggaggtgaggcccagtccccaggacagaggccatggtacccagggttgagccctgctgacttcaccctctttgtcttggtgctagacatcaccacggagctggcatacctcacacgagaactgaaggcagatccttgcgtggcccacgccttggcattaaggacagcctgggccctgggcaactaccaccgctttttccggctctactgccatgcaccctgcatgtctggctacctcgtggacaagtttgcagatcgggagcgcaaggtcgccctcaaggccatgatcaaaacgtatgtggtgccaagctcccttctgcctttgctcttcccatccttccgcctcgcaccgcccctcagaccagctcctggccgcaggcctcccccagcccccaacccttgtcctggtccttgcttccccatcatctttctccattcagccctcccctctccagttcctcttgctctccttgttggtcacctctgtgttccgggtcactcctctccctctccccactgttcccagctcactgcctctggggcctcttctccaccccatctgtgtgtctcttcctcctgttctctcctgcctggaccccctagttcactccttgccctgggcttcctcagaaccctgaggtctctgctttctcagcttgtcgctgtgctcccaccatagagaccatctagacagcctctggtctaccaggacaaggcccagtcccactcagctcctttgagagcaccagaaacgcttagggagacacctgtgttgaggccacactgggcgcggtgccagaggcccctggtcaggccatgcccctgcagtgtccttcgttcactagacattgcgcctggcttgctgtgggtggggatgagttgcttgactcatgtttagacgcatggttctgtctggtgattgaggtgcccaggcgacgctgggcaatgtcaagagaggttttcgcttgtcacagcaaggggatgctcttggcatctagtgagtggaggccagggatgctgccctgccactgccattgggcctcagagctcagtcttgccaaggtggagaaattctggtcgaagaggttgaccggtagactgaagaggccttgagagcctggccaggtggctgtccacgtgaggtcatagtcacagcatggaggccttgagagcctggccaggtggccctccacgtgaggtcatggtcacagcatgggggccttgagtgcctggccaggtggccctccacgtgaggtcatggtcacagcatggaggccttgagagcctggccaggtggccctccacgtgaggttgtggtcacagcatgggggccttgagagcctggccaggtggccctccacgtgaggtcatggtcacagcatggaggccttgagagcctggccaggtggccctccgtgtgaggtcatggtcacagcatagtttggagctagggagggactgtcagcctggaggtttggagactcattctggaatctagtgtgggtcaagccaacttcagggagaggctgagccagggtaggagtcacaggagcagacgaggatgtggggtgccgtgcacagagctccatgaccagcttgggaagttagaaggaaggggaggcaggaggctgcttagtctgctgccatgatgggccccatgaatggtggctctcaagcttctgtgctacacaggggtgtgtggttgggcgagtgtccttgttaattgatacctaattggccttggttgggaacatagccatgagtgcccctcgtgggtggggcgccagtctgtcattgacctcattgtgtcagcaccttccccccaaggaggctgaccctgccctgccagctgagactgggagacggagtgggctctgatcccagggcttccaggaaagctctggctttggagcagaagcgggttctaggacttagtgcccctcactcggtgcctgggttcctgtgtgtgtggaaagggtagggctgcaccctgtggaagagggttcagggagctctgaggacctggctcgtgctagatgctcagtcagtagtgtgttttagcagcagccggaagtgactgctttcagtgtgtagtggtgagtgctagctggcacccctgcgcctggcttcccagacactgtaacgcagggcaggggaggcagcgagggctgggtccccacggtggccctggcagccccgccatccccatcccctgccacgtgctgctccctccatctggtccctgcccctcagccagcggaggagcccgctgggcccttccctgcccgtccccgctcctccctggcccccgcacaggtaagtgagggtgaggggggcacaggggactggggtcactaaccccccccgggccccccccgagcccctgaggtggggaggctgggaggcgggtggggagccagcaggcactgtgctgaggaaatcctgtgggcacccgaatgggggggcctccccgctcgtggggccctcccctgccctcccgcccgcccgcctcatcaccttctcctcttgtctccatagcttccgccctgcgctgccagtctcctacctgcaggccgagctggccttcgagggcgaggccgcctgccgggccttcctagagcccctgggcctggcctacacgggcccggacaactccagcatcgactgccgcctcagcctggcgcagctgtcagccttctgagcacccagcgaggaggggcgggggcaggggctgcagcccccagcgctgcctttgcggattctgtttttgagccgtggacttgggttgtaaatttatttgtggggagtgcgctccaggaagagccaccatccctgcccccgttttcccaccggggagtctgtacagagatttttctacgtttttattttttgcctcagagggatgggattggggaggaggggatgggcagcggagggttgggggcatggtctgcaggctcatctgtgtccgcctttcactccactaatgctgtctcagtgttttctctctctctctttcgagcttgcactccggtacccgacccggcgccctggcccatcccatgccggggggccagtggaaagaagacaggccgtccagcccgtgcccgcctgcggcgggggcacccagcaagcccgcccaccgcccgctgcctcacctgcttcgccacagactcttgttcccagccccttggggcctccgtgtttggggtgggggagctgcttagagactgtgcccgtcctcggccccccaccctgaagtgccagcaccaccagcaccagatcctccgccgccacaccgcactgaggacacgccggccgggccgcctcgtctcaagttgtataaagttgtctccgtgtcccctcctccctctgcccccagtgtttcttctgatttttttttcccctttccctccctccctctccgcattcttcccttggttcagcacaggtaaaacggttcccctccctccctgccttcatggatcaccagctcacgtcatgttgccttctcttttctttgtgtgtgtgtttatttaagttatttttcttcctcctctcccttttctttttggccctccctccctccctcttctgccatgtaactggaggatgtgctatgagtttgcaaacagctggactgtcaggctgctttttttccagatgttcctcctctgcctccccttcccctcctctcccctccttttccttccttccttcctttccttggagcactgagcaccatttggaagcttgagagaaaccaaaattaaagagagaaagagagagcgtgcacgctcctgctttgtctttcctgtgtgggctgtttgcatccattgtctcctccagaggtctgggggtgtcactccagggggatctcagccaggggctggaaaggcccccctgtcctccctatacggcacagccagagtgtctgcaggggctggcaccccacttcctggctgagggtgaactccagcttggggaggtggacctgggaaccatggggcaccttggccacggtgaggtgggggtgcagctgccctggagactgtagtgtactcagcccctcggcttccagcctctggctcagcacttgtgccatgctttccagtgtgggagagggtggggcacacagcacatgcgggcccaggaggaccagctttctaaagctcagccgagggggtgcatttagccccggggccaagagggcccgtctcagagctccaatggcagcggcctcctccccagcgcctgccagtcgcagcagggccagggtcaggtgtaggttctgagagggcactaggaagttggcgcagtgtggggccacgtggaccaggtattcctgggccttggtcacttctgcttgtagcccaggctcggtcaccatgagggccacaaaatgtgtggggcgcggttggcaaggggctgcaacactaaggcgggcccttttgtcctcgggccaggccgcaggaccccactcggcttctgtcgtctcagcggagccccccgggactcccagggcctgtgcttccttgccccccagcaatgtggtcctggtggctgctgttggcttcagtgcctcagtcactccggcgaggcgtcctcttggggccagtgttcccaaatcagcagctgtgcccagcgccctctcctgggccgcctccagctctccgggttcctccacgcctggttcctggtgccctgtgcagagcggccttgtgctccctcgcttgggggcagcctgggcctcctgacctgtccccgccagtgtccactcggcaccctctgccccgtgggcgccctcggtgttcggtgcgtccaggatggtgggcccgcgtcccgccgccgagccagagccaaagacgaggtcggtgcgcgaggcgcggtcccacacaaggcggccacggaagcggaagaagcgcacgcggtgctggggcactgccagcacgcccggcccgagcgccgccagcggctggtcccagcaaaaggcgctgaagggctcctcgcgcacacccagaaagcggtcgacgtagcccaccgagaagtcggcggggtcgaggcgcgggtcccagcggatgcgctggatgacgtccgcggctgtgcgcagcggcggcttcttggccccggcctccggctgcgcctcgcggccaggcggcgccggcgccccagggtggggctggcggcagcgggcgccgaagcggcagcggccttccaggaagaagcggcaggccggcgggggcgcgggttccgtggcgggggcttcctgcggcaactccggctctctggccgctgccatgggtgcggggaactggcacgcccgccgcgcagacgaggtcgccccgcacggagggcggctccccttggatgcaccgagcctcacccgacagtggcgtcagcggcccgcgctccggcctagctctggggaccacgccgcgtgccctcgcgaggactctggcccagtccctccttggtggagagcctgacaccgctgctctgggacttcccggctgcgccctcccccagcgccaggaaagcaagctgcgtaaaggctgcggcagtctcggtctcccggagctcttgggagcctggccccgcccctttcccggtgattgatgtgtgctgcctctttctgggtgatttacatgtaatgccccgcccctttcgggatgattacgtgtgcctcgacctttaggtgatttacatgtagtgccccgccccgttcccggtgatttacatgtggtgccccgcccctttcctggtgatttacgagtgccccaccccttttaggtgatttttttttttttttatgtgtgcctctccccttcccaagtgatttacatatgttccccgctcctttcagggtaatttacatgtaatgccccgcccctttccgggtgatttacgagtgcctctccccttctcaagtgatttacatgtgtcccgccccgttccgggtgatttacatgcgtgccctggccctttcccagtgatacttttgtgctgcctctttccgggtgatttacgtgtgtgcctctccccaagtgatttacatgtgtgccctgtccgttttaaggtgatttacatgtggtgccccgcccctttccgggtgatttacctgtgtcccatccctttcccggtgatttacatgtggtgccccgcccctttcccggtgatacctgtgtgccccgcccatgaggggacgtctttaaagaacctggacccgccctcagtccaagtgatttacatttgcggccccgcccctctgggaaacttacgagaacctggcccctcagtccaaatcatttgcatgttcggccccatccctcgggggccttaaagaaccaagatgcctgcggacccttcccccacggagaccaggcccctactgctctaaaagtgttctcagacacttccctctgcagccgctcccagagtaaacggcggctccgccgggtcggagtccacctgaggcgttcagggccagaaagactcctggggctgcagcactctgcagccccgcctcggctggccccgcggtggctgagtctggcccggccccaggaccacgtccggccggcggtggcgcacagtatttgacgaatgggactgcgggagccgccgcctctgcaaggggcaccgcctggccacgccctcgggctctcttaaaggagccgcacccccaccccagggcaatcatcggacccggaccaggcctccgggtgacacatccggctctcagaggcgccaggaccctatcattcatccctttccacgtgcaaagtgaaaagtcagagcccgggcacacaccttggccgtttatgtatacagaagtggggtgccgggcgggaagggcgcggggaatgagggaacctagaggccgatgacgtcgttcagctcgaggtccgcgttggggcggcagcgggcctgggggggctgcgtcccggggcggggttccgcgtcgggcttggcggcagccgcctccgggcgcgccgcgtccatgacgcccagcaccgcgtccagcatggagggccccagatccaggtggaaggacagcagcgggtcggcaggcgagggcgctgcggactgcgggacggcgggcggcggcggggagcgcggggcccccgcggggggcgcccggggctcggggggcggcccgccgccgtggcggctcaggaacgaggtgtccccgaaggcgtcgccgccgcgccccacgtgcagcgtgtgccggaagtcgccgagcggcgcggagatggacagggcgccgcgatcaggccgcttcttgggctgcgcggggcccagctgcttcagcacgggcatctgcgaggggcacgggagggtcagcgcggccccagcccggggctcgcagccacgcgactgctcaaaggacgatgggggacggttcccgttttttgttttttgatttttgtttttgagacggagtctcgcccatgctggagttcaatggcgccatcccggctcaccgcaacctccgcctcccgggttcaggcgattcttcctcctcagtctcccgagtagctgggattacaggcacccgccaccatacccagccaatttttgtatttttgtagagacggggtttcacaatgttggccaggctggtcttgaactcctgacctcaggtgatcaacccgcctcagtctcccaaaatgctgggataacaggcgtgagccaccgcgcccggcctcccgtttcacagatggggtaagatgagactccaggaggtcccatgggcacagctgctgagctcacatttggatctaacctgactccagaatgcctatgaacaccatgctatgccgatcctcctgagagcgaatacttgagccttcctagaggtcaagtaacaaatatttcacaaacccttcagagtgcttcccagacttgactgatagaaaactccagcttgttggcccgggtgcggtggctcactcctgtaatcccagcaccttgggaggccgaggcgggcggatcgcttgaggccaggagttcgagaccagcctgagcaacatggtgaaaccccatctctataaaaaatgcaaaaattagcggggcatggtggcgcatgcctgtaatcccagctaaagtaggagaatcgcttgaaccccggaggcggaggttgcagggagccgagatcgtgtcactgtattggccactgcactccagcctgggcaacaggagtgaaaccctgtctcaataaaaagaaaaagaaaactccagcttgtcaaaaatggaaattcccaggctcctgttctgaagacagggctgactctgtccattaagcaaagcagatcctgcctagagcccaccacgcacacgaggaagaggcccaggtgggctttgcctagggtgcattttatgatttgaattacagtccttggtatctgtgggttccgcatcagcagattcaatcaactgctgataaaaaatactggggaaaaaatacagtaataaaaaatgagtacaagtttcaaacaatataacaattatttgcaaagcatttacattgtattatgcattataagtaatctagagatgatttaaagtgtaggagaggatgtacataggttatatgcaaatactagggcatttatataagagacttaaacatctgcatatttgggtatccataggggtcccagaaccagtcccatcactgctaccaaggggcaactgtacctgatcttttttttttttttttgagacgctaatttttgtatttttagtagagacagggtttcaccatgttggtcaggctggtcttgaactcctgacctcgtgatctgcccgcctcggcctcccgaagtgctgggattacaggcatgagccaccacgcctggccaactgtacctgatcttgagactacaacctaacaatatgatgtcttatgttttctaaaataataatataaattccctagccaggcatggtggctcacacctgtaatcccagcacttttggaggctgaagcgggtggatcacctgaggtcaggactttgagaccagcctgaccaacatggtgaaactccatctctactaaaaaaaaaatacaaaattagctggttgtggtggtgcatgcctgtaatcccagctacttgagaggctgaggcaggagaatcgcttgaacttgggaggcagaggttgtggtgagctgagatcgcgccattgcattccagcctgggtgacagagtatgactctgtctcaaaaaaaaaataaaaagccctatgttaaaaaaaatgggaagaattgcataaatttgaagctggcagcatctgcattgtaaactaggtgctttattgcccatagctgcaccaaattcttttttttttttttttgagacggagtcttgttctgttgcccaggctggggttcaagcgattctcctgcctcagcctcctgagtggctggaattacaggtgtgcgctgccatgccctgcaaatttttgtatttttagtagagatgaggtttcactatgttggccaggctggactcaaactcatgacttcaggtgatccgcctgccttggcctcccaaagtgttgggaatacaggcatgagccaccacgcccggcctaaattcaatatgaaatagaaacgcagccacagagtctgcccatatcctggtcattgcatgttttgtgtggaacttctgggagggactttgatgaccttgtacttttgttttaacagtcactgttatcgcaataataaaaacctatttcagttgaagccctaccctttgccagctgtatgaactgcaataaattactttatttccctgtttacttttctatctgtaagataaataaaataacactaccttcctttcaggatacatagaaaagtctgatcaaagaaaactatacttgtaatagtgctaaccaatgggtaatgctagcgttggggggaaaatatttccctaacaataattgtggaacaaaaattaggttggatagaacactatgagaaagacaaagccgctgacattgttttcaccgtaacaggcaccctgggaagtattggtgataatatggaggaaaatgaaagccaaagggatttaaaataattgtagatggctagattctgaagactggcctacacacacacacacacacacacacacacacactctttacattgatttccatggggaaaccagttttgatttactacctctgcagcatttatcaaatttctctgacctcaacctagatgaataaatatatttttatcgttacctagcacacaatctccactctctccttccccataatggaaataaaaattttaagaaacaagatttgtcttgttttgagacagggtctcactctgtcacccagctggagtgcggtggtgagatcttggctcactgcaacctccgcctcccggactcaagcgatcctcccacctcagactcctgagtagctgggactacaggctcatgctaccatgtagtgttatttttgtatttttttttttttttgtagagatggggtttcaccatgttgcccaggctggtctcaaactcctgagctcaagcaatctgcccgccttggcctcccaaagtgctgagattacaggtgtgtgccagtaagcccggccaatacttacttgtcttacaacgtggtagatactctgattccttccttccttccttccttccttccttccttctttctttcttttcttccctccctccctccttccttccttcctttcttttctttctttctccttccttccttctttctttcttttcttttttgatggagtcttgctctgtcacccaggcaagagtgcaatggcgcgatctcggctcactgcaacctccgcctcccaggttcaagtgattctcctgcctcagcctcccgagtagctgggattataggtgcacaccaccatgcttggctaatttttgtattttatagtagagatggggttt[132 bp omitted]tttatttttaaatgttgagctcagctcattaatgtatcttctggatccacagtttaaaaaaaaaatcctctctagctgctaacagagcctatgatctcagcacttgctctgctgtgggtcagaggtgaaaaagtggaattcagaaagtccattgcacaggtttgaatctggctgtgctgatcgctctgtggctttgagcaacttacttgacctttctgacctcatttccttatcttgaaaatggcatgatattaatctaatacttcccagtccttttgcaagaattggtggagggatatgtccctgcaagtcttggcacagtgcccagcgcacagggaatgttcaattaacatatgctcaatggagtcacacctcggatcattctcccagtgttccagagaaggaaatgggtgatccgagacaggacgtgactgaccaagatcacaaagccagctctagggaactccagtgtctagagctggctgcctccactctctgctgcctcttgactcgtggacagctctcagcccctgcctctggtcagacccagctcccagcatgcacctcgcatcccccttccattgccctatccgttgccaccacttttcagcacctggcaacacacataaagtcttggtttctgacatcacacacatctgggctcaaattttgccatttccttcttgtgcgatcccaaactggcttcctcaacctaaagctcagtttactcctcaaaaaacaggggttggaactcttgtttgtggctgggcgccgtggctcacacctacaatgccagctctttgggaggctgagacagcaggatcacttgagcccaggagtttgagaccagaatgcgcaacaaagtgagatgatctctctacaaaaataaaaataaaaaattagccaggtgctgtgtcatgcacctgcagttccagctacctgggaggctgaaaagggaagatcccttgagcccaggagtttgaggctgcagtgaggtatgatcgtcccaccgcacttcagcctgggcaacagaaagagaccctgtctcaagaagaaaagaaaagaaaaggagagagagagagaaaaagagagagaaggaaaggagggaggagagggagggaaaaaaggaaggaaggaaggaaagagaaagaaagagaaagaaaaagaaaggaaaggaaggagaaagaaagaaaggaaagaaggaaggaaggaaggaaaaagaaagaaaaaaagaaggaaagaaagaaagggaagaaagaaagactacactgagggtgccgaaattttattttccaagtgcttatcctgggccaggcaccagcctgagtgcctccccatgaatgaactaatttatttaatcttcaggacaactccattttacagatgcgcgatggctgagacacagagaagttaagtcacttgccctgggtcacacagtagcaaatgctgcgcgccagatctggaatccagacgaactcttagctccccataggagactacgggcatgccaccccatgagaaaaaaaataataatgttctgatttgatatgaaggcgagagatttcctctgacacccttgattgtcttttttcctctccagtccagaccagaacaacgagttggaagtcgttttcgaatgccacctctgcgccctagctctgagaccctgggtaagtcgcttcacttctgccagcctgggtgtcctcttaaatagaagcctctgacctccctctggttgaattgtgtttaaagcaatgaggtcatgctcggaaaaagtccctcacgctgccagggctcgggacagaggggctgttgtttgtgaccaacgtggaacaggcagaaagcggggcgcgaccgtggagcccggggaggcccgggccgcgcgttctccccccgcctccgcccacccctctctttcctgctggggcagggccacggctccagctgcagggtggcgggcacagctggttcacctctgtcctctctcagtcccggccccgccaggacggaaataacaacccactctagatccggcccaactggttctcagacccgtgggagctgcggtgcagccgggtcgggggaccccagatggggagacccccggcccggcgagggcttcactgcgcgcttcctgcagccacgtggctgcggccgggaattcagcggcccttttccctcccgaccgggacccaggacccctgtccccaccgcgccttacctcgcggtcctcccagagcggggcgggcgcgcgctcacgactccagctctagcccggacccctggttccctggctccgagtccgcctccgtctcctaatccccggcccgcgccttccttcttcctccgggcgggttctcacctggtaaggaaagtgtcatgtggaacccggagggagattcaggagccaggcatccgggtccgtagagccacctcctccttcgccctcaggtcctaggcgtcctagatcttcgctttcttaatcccaccccagacccgaaagtcaggggcccccagccccttcttcctcagacccaggggtcaagaccccccagcccctcctccctcagacccaggagtccagacccccagcccctcctccctcagacccaggagtccagaccccagcccctcctccctcagacccaggagtccagaccccccagcccttcctccctcagacccaggagtccaggcccccagcccctcctccctcagacccaggagtccaggcccccagcccctcctccctcagacccaggagtccagacccccagcccctcctccctcagacccaggagtccaggcccccagcccctcctccctcagacccaggagtccagaccccccagcccctcctccctcagactcatgagtccagacccccagcccctcctccctcagacccaggagtccagacccccagcccctcctccctcagacccaggagtccaggcccccagcccctcctccctcagacccaggagtccagaccccccagcccctcctccctcagactcatgagtccagacccccagcccctcctccctcagacccaggagtccagacccccagcccctcctccctcagacccaggaatccaggccccatcccctcctccctcagacccaggagtcaagaccccccagcccctcctccctcagacccaggagtccagacctccagcccttcctcctccctcagacccaggagtcaagatccccccagcccctcctccctcagacccaggagtccaggcccccagcccctcctccctcagacccaggagtccagacccccagcccctcctccctcagacccaggagtccaggcccccatcccctcctccctcagacccaggagtccaggcccccagcccctcctccctcagacccaggaatccaggccccatcccctcctccctcagacccaggagtccagacccccagcccctcttccctcagactcaggggtccagacccccagccccttcttcctcagacccaggagtcaagaccccccagcccctcctccctcagaccaggagtccaggcccccagcccctcctccctcagacccaggagtcaagaccccccagcccctcctccctcagactcatgagtccagacccccagcccctcctccctcagacccaggagtccagacccccagcccctcctccctcagacccaggagtccaggccccacccctggcaagccctggcataaggcccctttacctgcaccgggagctaaagtgtcagcccctctcgggggccatggcaggagcccaggcagaagcggaatcaccgcccagtccccaggcagagagggttttggcacaggcccctcccaggctttcttatcccccaaaagtttgcctctaggagttaaaggactagaaagcagtggtggaaaagctgaggcccctctgggcggagtgtgggggcgggaggaggccaggactaagtgtgcagggggaactggcagagggggtggggctggacagggcgcgcccccagcctggcccctcccctgcacagcttggaatttcctgaaactggggaagtctggctgtttagaagagtaatttcttccagattgcagctgtatggagagagagagagggagagagagagagagaaagagagaagagaggcaggtcagacagtgaaagcagcaggaggatgaagagcatggagggtgtctgagaggggcagctctggctttgctgcggcgtcccctagatgaacctccctgcctggagccactccgtcatagaaagctcatatctcattctaagcaccagtgtctattgatgacaagagagtgaggtttgagtgttagggcaattccttcagggcggtgcgggcagggagagagagcggagggggagagcagagtcccaaggcaggatgcagctcagtgggaagaaggtgggaagcccaggtgggagtctaggtctgtgggagggaggtggaggcccaggtgggaggctgggtcagcgggagggaggtggagatgcaggttggagcctgggtcagggtcagagggagagggagagggaagcccaggtaggaggcagctcagtgagagaaaggggaggcccaggtgggaggctaggtcagtggttttacccctagctggggctggggttgtagtgctggagagaagacagtcaatttgcgataacaggaagcagccttgagctgggtcttaaggatgagtgagagttgatggagcccaggagaggaggatggatatcggagcagaatggggaagctgggtggggcagagggttctcagacaccaggtggagtttgatttgcctggagaagccagcttgaaagccactgggagcttcagtttgccctgcaggcgtggggggaccgcggaggaatggcagggaaagatccaggtgttagaaagttcccactggggtccccgcaggggatggagtgaagcaggtcaggactcagcacccacagcaaaatttaaggggggagggggcagtggtcaccagaaactcagtaatcagaaaaactatatatatatatatatatatgttacagacttttattaagtattttttattgatgtaaaattcacataacataaaattaaccatcttttttttttctttttttttaattgagacggagttttgttcttgttgcccaggctggagtgcaatggcgcgatctccactcactgcaacctccaccttccaggttcaagcgattctcctgcctcagcctgttgagtagccgggattaccggtgcctgccaccacgcccagctaattttgtatttttagtagagacggggtttctccacgttggtcaggctggtctcgaactcccgacctcaggttatccgcctgcctcggcttccaaagtgctgggattataggtgtgagccactgcatcgggccagaattaaccatcttaaggtgtacagttcagtgacatttagtacattcccaatggaacatacctaattggtacactggtaattgtgtagccatcctttctatcaagttcccaaacattttcatcacccctaaagaaaaccctattaagcggtcactcccatgccccgctctctgcagcccctggaaaccactcccctgttttctgattcatggattacctcttctggacattcgcataaatggaatcacacatcatacagccttacctatctgacttccttcacataagcaggttcatccgtgtgcagcatgtgccagtggttc[133 bp omitted]caacttggtgaaacgctgactctactaaaaaaatacaaaaatcagctgggcgcagtggtgtgtagtctcaggtactcgggaggctgaggcaggatactcgcttgaacgcaggaggcggaggttgcagtgagcccagatcgagccactgcactccagcctggacaacagagcaagactcgctctaaaaaaaaaaaaaaaaaaaaaaaagacgaaaaaaagaaaaagagatatgtatataagagatctatt[137 bp omitted]gtggcgggcgcctgtagtcccagctactcgggaggctgaggcaggagaatggcgtgaacccgggaggcggagcttgcagtgagccgagatcccgccactgcactccagcctgggcgatagagcgagacccaaaaaacaaacaaaccaaaacaacaacaacaacaactaaccatcacgccaggataatctccctgacgtaagatccacaattttaagtgcatctgcagacctattcacgggtcgcagggatttgtgcgtggacatcttgcatgtgcgggggtgggtggggctattctgctaccacagtgcccctcagaggtcaggtcctgggagggggcggggccaaagcagggccagcttcatgggttgcccagtgacccatgctcggagggccctgcacctttctttttttgtttgtttttgagacaaagccttactctgttgctcaggctggagtgtcaaaggcaagatcttggctcactgcaacctctgcctcccgggttccagcaattctcccgcctc[134 bp omitted]cggtctcccaaagtgctggaattaccggcgtgagccactgcacctggcctttttgtttgttttttagacagagtctctatctgttgctcaggctggagtgccaatggtgagatctcagctcactgaaacctccacctcccgggttcaagcgattctcctgcctcagcctcctgagttgctgcaattacaggcatgcgccaccacacctggctaatttttgtgtttttagtagagacggggtttcaccatattggccaggctggtctcgaactcctaacctcaggtgatcggccggccttggcctcccaaagtgctgggatcacaggaatgagacaccgcgcccggccaccacacttcttttaatgctcagttgtcaccaatttgaaattccttacgttttgaagaagggatcctgagttctcatttgcaatagaccccaccaattatgtggctggttctggatggaacagcgggaagggcagaggcctgggagaaagtggccgagaagagcaacgatggagagataaaagggaaaggaactctggatgataccctggcagcagcctgggaaagcaaagagggaggaagagagaggtgtgtcccagaagcctggagtgggagatgcaccgtcccttccttgtggactcaaaagcaggctaagtatgattaaaaaaaaaaaaaaaaagagggagtgaggtccactggactcagtaagaatccagagttcactgggggcctgggtgagagcagacccaaatggggtgggcagggagaggtcagattgcagtggagaaggccagagagagagagattggaggccaggaaaggcggaggggtcagcagataacccagggtgtcctctgtgaagggaaagagagataaggtatctggaagaacagggaaggtcaaagaaaggttttaggttttttggttcatctggatacattcccaactttttttttttttttttttttttctgagacagagtctcagtgtatcacccaggctggagtgcagtggcacaatctcagctcactgcaacctctgcctcccgggttcaagcaattctcctgcctcatccttctgagtagctgggactacaggtgtgtgccagcatgcccagctaactgtgtagagatagggtttcgccatgttgcccaggctggtcttgaactcctagactcaagcaatctacgcgtctcagcttctcaaagtcctgggattacagacctgagccactgtgcccagctggttcctgagactgcaccatgattccttagctgatttcagtgagtacatactgccagtgcccctacataattatacaccagttcctagaatctttttgtaattattcagacttttatagcaatctaatcatcactacccggcaatttgttttcttaagtctagtgctattgagggggttccaacgtttcccttttaaatgtttcagcccctcttctgagtagcagggacatggatggaactttgatcctatcttatccttaaagagcttacaggatattgagaggagaggagggaagttgacatggcaccacccagtggaatgacatagtcagcacagagctcagtgggagcacagaggaagagcgccaggcccatcatgtccagctgcgtaggttgtgcactgcacaactctggggtcatcatatcacaaactgagtgtgaagagccttgtgaggcttccaggacaggtttctaggggtcaccagatgctggtctagatcaggatggaggaatcttgactcctagaaagaggtgggcagggaattgctgaggacgtttgaagtctaatgggctgagccttccctgtggtgagtggcagctcagctttctagaggaagtttgggaagaagaatcctcagtgaaggggtgttctacttggagtgattcgtgtttccttccagctcactcagggtagtcatggcctcttccctttccctggctctcagtctgcatccaccacactgttccccctgctgaactttgcacactccagaccactggaccactgctgcactttctcatttatccagatcattttcaccttctagtaagctgtgaatgtgcttattatgcccaagggttactgtctgtctccttctgcaagaatataggctcctcggctgggcgttctgggtcaggcctgtcatccccagcactttgggaagccgaggtgggcagatcacgaggtcaggagatggagacaatcctggctaatgcgatgaaaccccatctctactaaaaatacaaaaaattagcggggcgtggtgatgcatgcctgtaatcccagctactcgggaggctgaggcaggagaatcgcttgaacccaggaggcggaggttgcagtgagccgagatcgcgccactgcactccagcctgggagacgagcgagactccatctcaaaaaaaaaaaaaaaagaatataagctcctcgatggcaaggatgttttgcatattgatggaccgctagagcctcaaacagtgtctggcacacaggacaggaccaacaaatactgaatgagaaaagtgaatgacagatggaaaagaacagaactaaacagggagtttctccactgggaccacaagagggcactcaagatacgtgtcaaacccttgaagccccaaggtgggtggtctctctgctcctcagcctggaggaccagggacaggtgacctggaccacgtcctttctcctctgtgagcctctatttccccatgtgtagcgtggagatggaaatgcctgaaatacgttcttgtgagaagcaaaaacccaacaacgcatgcacgtgaatgtcttccaaggggttgcacgtgtccaaattcatctaattgtgtacattaagtgagagggttttttagtagaacaattatagctaaacaaagctgctaaaatgtaaataaaataaaaaataaaacttgcattgaacaacaacagagccgttaggctagagcaagaaatctgaaggatggcaatccagaccccaataaatccacaaaggggtgtgtgtgtgtgtgtgtgtgtgtgtgtgtgtgtatgtatttttttttttttttgagacggagtttcactcttgttgcccaggctggagtgcgatggcgcgatctcggataacctcaacctctgcctactggattcaagcaattctcctacctcaggcttccgagtagctgggattacaggcatgtgccatcacgcctggctaatagaaatattaattacatgaagcaaccagtgagcacaatgctatcctgtgaaattattaaaacctaaaactaaatggaagctctggttgaaaagtgcaatacattcctagcaggatgggagacattcagcaaaatcaatcatgtgtctgtatactaatgaacaataatttaaaaacgaagtgaggagaggaattttatttacaaagcctccaaagtaataaaatgagtgggaagaaatttaataaaagaaataaaggacgtgtatactaaaaattacaaaagatgctgagaagttaaagatctaaataaacggagaggctgagcgtggtggctcacgcctgtaatctcagcattttgggaggccaaggcaggcaggttacttgagatcaggagttggagaccagcctggcctacatggggaaactggtctccactaaaaaacaaacaaacaaaaattagccaggcatggtggtgcacacctgtaatcccagctactcaggaggctgaggcaggagaatcgcttgaacctgggaggcacaggttgcagtgagccgagatcgtgccactgcactccagcctggatggcagagccagactccatctcaaaataaataaatacatacgaaaatggagaaacagttcatacattcacaatagcatccaaaataataaatataagaaataaaaattaacaaaaagtgtcatcttgcaaagcagtaacataatatgaaaaaaccccactgaccacatccttcctcattcttagaaagggaattatggtcatagtggttgacctgtggccatgtaattctgtccaaatatccctgaatggtaaatgtgaaaacagtagaatgaattccattgaaaataagaaaacaagaagaaataaagtcagaacgcaaaagttttttttaagggttattgggatggaattttgtttgtttgtttttttgagatgcagacttactctgtcatccaggctggagtgcaatggtgcgatctcagctcactgcattctccaccttccgggttgaagccattctcctgcctcagcctcctgattagctgagattataggcatgtgccaccacgcccggctaatttttgtatttttagtagacggggtttcaccatattggccaggctggtctcaaactcctaacctcaggtgatcggccggccttggcctcccaaagtgctgggatcacaggaatgagccactgtgcctggccaccacgcttctgttaacgctcagctgtcaccaatttgaaattccttacgttttgaagaagggacgtcgagttctcatttgcaatagaccccaccaattatgtggctggttctggatggaacagcgggaagggcagaggcctgggagaaagcggccaagaacagcaacgatggagagataaaagggaaaggaactctggatgataccctggcagcagcctgggaaagccaagagggaggaagagagaggtgtgtcccagaagcctggagtgggagatgcatcgtccctttcttgtggtctcaaaagca[136 bp omitted]ctcatctctactaaaaatacaataattagctgggcgtagtggcgcgcgccaagatggagcttactcgggcggctgaggca[137 bp omitted]atattgatggaccgcgagagcacaggagaggaccaacaaatactgaatgagaagaatgaatggcagatggaaaagaacagaactaaacagggagtttctccactgagaccacaagagggcacccgagatacgcgtcaaaccctcgcagccccaaggtgggtggtctctgctcctcagcctggaggaccagggacaggtgtgaccgggaccacgtcctttctcctctgtgagcctctatttccccatgtgtagcgtggagatggaagtgcctgaaatacgttcttgtgagaagcaaaaagctaacaacacatgcacgtgaatgtcttctaaggggttattgcatacgtccaaattcatctaattgtgtatattaagtgagagggttttttagtggaacaattgtagctaaataaagctgctaaaaagtaaataaaataaaaaatgaaacttgcaatgaacaacagcaacagagtcattacgctagagcaagaaatctgaaggatggcaatctagaccccaataaatccacgaagttagaattttttttttttttttttttttttggtgacggaatttcgctcttgttgcccaggctggcttacaatggtgcaatctcggctcaccgcaactgccgcgtcccgggttcaagcatttctcccatctcagctttctgagtagctgggattacaggcatgtgccatcgctcccggctaacagaaatattaattacatgaaacgaccagtg[225 bp omitted]gaggcaggagaatggcgtgaacccgggaggcggagcttgcagtgagccgagattgcaccactgcactccagcctgggagacagagcgagactccgtctcaaaaaaaacaaaaacaaaacccataaaactaaatgaggctctggagttgaaaagtaccacacattcctagcaggataggagatatattcaccaaaatcaatcatgtgtctgtatacgaacgaacaataatttaaaaatgaaatgaggagagcaatttcatttacaaagcctccaaaataataaaatgaatgggaagaaatgtaataaaagaagtgaaagacgtggatactaaaaattacaaaagatgctgaggagaaattaaagatgtaaataaatggagaggccgagtgcggtggctcatgcctgtaatctcagcactttgggaggctaaggcaggtggattacctgaggtcaggagttctagactagcctggcaaacatggggaaacctgatctatacaaaacaaaacaaaacaaaacaaaacaaaaaacttagctccagcttagagccagactccatcccaaaattaatagataaatacatacatgcatgcatacatgaatggagaaagtttatacattcacaatagcatctgacataataaatgtaagaaataaaatgaataaaaagtgtcatcttgcaaagcagtaaaataagatgaaaaaacctcactgaccacatccttcctcattctcagaaagggaatcacggtcatagtggttgacctgtggccgtgtaattctgtccaaatatccatgaatggtaaatgtgaaaacagtagaatgaattccattgaaaataagaaaacaagaagaaataaagtcagaactcaaaagtgtttttgaagtgttattgggatggggttttttgttttttttttttttttttttttagacggagactcgctgtgtcgccgaggctggagtgcatggtgcgatctcggctcactgaaacctctgcctcctgggttcaagcgattctcctgcttc[131 bp omitted]acctcagcttcccaaaatactggccttacaggcacgagccactgcgcccagcctatttgttattatttgataatatttatattatcacctatcaatttatgatgacaagtgcacttaacataagatctatcttagcaaatttgtaagggtacaaggcagtcttattccctgcacacactaagccgcacaggagactctaggccttcctcatcttgcatgactgaaactcaagagggaaaaatgaggagttatcagtcataggaaagagatcttgataccttgcctgttctttctaagccaatactctcagctccttaaagggggcacttttatttcattttattttttttccctcaggtataaataatttaatttttttcagttataaggctaacacatactcaatttaaaaatccaaataaaaactcctcaaaaaatgaagagccatttaaactcccttgacctaatattaactgctacaaacatcgtgattaatattttcctacaaatctctccttccataaacatgtgtataaacatgcatatgtaatttaacttacatgtggcctctatatacgtgttttttttcctgttttgctcactcaacaaaatcctcggtatcttccatgtcaatgaaagttaaacagcaccatcatttttaatgaccacacagtattccattgcactgggcaggtggggggcagggcattgtttatttaatatttaagtgtccattaagtgatgggcaatatgtttctaattcactgctcttcattctacaagtgtttgctgagcatctattatgtgccaggccctaagtaccagtgataaagtgatgatcaagacagaagagccaagacttccctggccaagtgaagtctccattctaacggcgggagagggacagcgtacaagtcaatgagtggataattagaaaggaggatgaacgtcaagaggaaatgaagacgaatcttcttagcgaaggaatgggtgtcgggctagtggacttctttcaacacagtggtctaggaaggctcttcttgctgagatgatgctgagcagagacctggaggctgtggtgcaaagcaggaggtcggtgcacccaggcagagacgcggagccccgaggcagggagggacctggtgtcttcaaggaacagcaggaatgtcatgtggcctgagggcagggagtgaggggcacagggaccaacgtgaaattggaaagatgagtaagtgtcccgtaggtcacagagtttgggttttgggccatgtgtactatgaagtcactggagatttcaatggtaacaaaacataatctgatttatgcttttaaaggatcactctggggccgggtgcaggggctcaagcctgtaatcccagcactttgggagac[132 bp omitted]ggctgaggcaggagaatcgcttgaacccgggaggtggagggtgcagtgagccaagatcacgccactgcactgcagcctgggcgacagagtgagactccgtctcaaaaaaaaaaaaaaaaaaaaaagaaagattattctggctacaatatggggaggggcagctgagtagcacgaaatgagcgtggagagaccagctaggggatgttccctggacgaggggagagagggtgaacctggcgccgtggtgctggcaagcagtgtctgcatgaggacagattctgaaggtagaacaaggggagagggtgagaaagaggagcagttgaggcgatttctaggactgcagcttgtccaggtggtggacggggaagaaaacgtgggagagccacaattttaactttctcatattaatccttccagtgtttgtttctgggtgaatatgagacaatatgaatgtatattctgattcccccaattcttggcacaatacagatttaatccctaagaatacactctgggatctctccataaagtacataggcgattttctttttattttctttttttgagacaagtctcactctgttgcccatgctggagtgcagtggtgcgatctcagctcactgcaatctccacctcccaggttgaagcaattctcctactcagcctcccgagctgaaatgatgggcgccagccaccaggtccagctaatttttttgtatttttagtagaaacagggttttaccatgttggccaggctggtctcgaactcctggcctcaggtgatctgcccgcatctgccttccaaagtgctgggattacagtcaggagcctggcccatggggcattttcaaatatatttctccctggtcttctaaattccagactgactgatgagaagtctgatgtaattatgataatagaaacttagtacaccattgtgttttttctcccacctttgaggtcttctttattttctttttcctttgagataatgcagcttggtgagtgcggtgagcccttagggaggcattttttctctctccctagcgtcactgctggctggcttcctcctctctgccctttacttcttttttttcattccagctcctcaagttgcatgttcagtgattaattctccaaacttcataatttcttttttttttttttgagatggagtctctgtcacccaggctggagtacggtggcgcgatcttggttcactgcaacctccacctcccgggttcaagcgattctcctgcctcggtctcccaagtagctgggactacaggcgcccgccaccacgcccggctaatttttttagtagagacggggtttggggtttcaccgtgttag[131 bp omitted]aaaaaagtgtgcttaaaacaatccacatttcactttaagtgtgatttttattgcatctaagtttcgatatgaataacattgttcatttctaaatatgtcacaacttctgtgtttttttttttaacagtcactcaaaagttatgcagatttttgttgttgttttaaaaatgtgtgttttttaaacgtttaatttttggtcttttatgtaatttttgcagtcacgaaatatggtttcattatattaaatctttggaatattttgagaccttcttggtggattaagaagtggtcaatttttgtagatttttcatatgttcctgaaaagaatgtgggttctccattgttgctgttttgtacatataaatataacaacacaccaataatgaaaataacaattatgataacaatcattaataatcaatattaggccaggcgcggtggctcacacctgtaatcccagtactttgggaggccgaggcgggcggatcacctgaggtcaggagttcgagaccagcctggccagcatggtgaatccacgtctctactaaaaatacaaaaatagctgggcgtggtggcagaggcctagaagcccagctactcaggaggctgaggcaggagaatcacttgaacctgggaggcagaggttgcagtgagccaagattgtgccactgcactccagcctgggtgacaagagtgaaactccatgtcaaaaaataaataagtaaataataataatcaatattagaacccttagtaatgtcaggctcagtctgactactttttttttatttattattatactttaagttttagggtacatgtgcacattgtgcaggttagttacatatgtatacatgtgccatgctggtgcactgcacccactaactcgtcatctagcattaggactactttttatttttaagaaagcatgcttacttttgcctttcatttttctatatttttaaaaaactttgtaaacatttatggggtacaagtgtaattttgttgcatgtaaagattgcccagtgatgaaatcgggacttccaggttatccattccccaaataatgtgcattgtacccattaagtcattttcttttcttttctttctttctttttttttttttttttgagacagagtcttgctctgtcgtccagggtggagtacaatggtgcaatcttggctcactgcaacctccatctcccgtgttcaagcaattctcctgcctcagcctcctgagtagctgggattgcaggtgtacaccaccacacctggctaattttttgtatttttagtagagacagggtttctccacgttggccaggctggtctcgaactcctgacctcaggtgatctgcccgcctcggcctcccaaaatgctgggattacaagcgtaagccaccacacccggcccccgttcctcattcttagaaagggaatcatggtcattgtggttgacctgtggccgtgtaattctgtccaaatatccctgaatggtaaatgtgaaaacagtagaatgaattccattgaaaataagaagaaataaagtcagaactcaaaagtgtttttgaagtgttattgggatggaacttttttttttttttttttttttttttttttttttttgagacggagactgctctgtcatttaggctggagtgcaatggtgcaatcttggctcactgcaacttctgcctcctgggttcaagcgattctcctgcttc[134 bp omitted]cggcctccaaaaatgctggcattacaggcacgagccactgcgcccagcctatttgttattatttgataatattgatattatcacctatcaatttatgatgacaagtgcacataacataagatctatcttagcaaatttgtaagggtacaaggcagtcttgttccctgcacacactaagccgcacaggagactgtaggccttcctcatcttgcatgactgaaactcaagagggaaaaatgaggaggtaacagtcataggaaagagatcttgataccttgcctgttctttctaagccaataccctcagctccttaaagggggcacttttatttcattttattttttccctcaggtataaataatttaatttttttcagttataaggctaacacatactcaatttaaaaatccaaataaaaacacctcaaaaaatgaagagccatttaaactcccttgacctaatattaattgctacaaacatcttgattaatattttcctacaaatctcttattactaaattactcgatagccagttattaagtaatttcagtctgagtaccattaacataattactcactgaataatcacaacagttccatgagttaggcaccattgcttttttattttacagaggaagaggcaaagaaatagagaggtaaataaacttagtttaaagtgagagagcttataactggcacgaccaaaattaaaatctagagatctggcctctggaattgtactagataaatcaagttatgcactcataactttccccatactccctatatactatgtctattcattcatcattcattcaaaaatatttattatgtactatgtgctagggagtgttccaggagcagggacactacaggaaacactgcaggaaaaaaatctatggtttcatggggatacattgtagtgggaaggcagatagtctacaatattaataagtaaaatacgtgcacatatgctgaagattaatgatatatgctgaagaaagaaaaaaggcagcgagaggtgatacgaaatctggagggagtgttgcaacttcagacaggatggtccaagaaggtctgaaggataaggagatactggggttgacagtgaaggagagggagggatgagccttgtgcctgtctgggtgaagagcattccagtcgagaatggcatgtggatgagccctgaggcagatgcttgcttgatgtttttttaggaatagcaaggagatcactgggactgcatcacagtcagtgaaaggcagagtcggaggagatgctatcaaagtactaacccaagttgggagacagaagacgcagtcgtgtcaatatgactgaggcgggaagtcctggaaagtttctgatcagaagagtggcacagagtggcgaatgtttttattgtattgtgttgttattttactacccaattgcattttattatcagcgtaccttattttatgaaattagacctgcattttggagggagagtctgattttcatgaaggcatgtggtatgcttctgacgataacgccagcattccaggtaagctgccgtcggccctacctccgggacagcttgatgcaagatgctaatcaaattaactccctgagcgtcactgttctcatctgtaaaactggcctaatgatgaaaacatcttcccaaagttgtgagaattaaaggaactacccataagggatactcggagcagtgtctggcatagagcgagagctcagaaaggttatctcttcctttgattgccttgtgcaattctgacttcaggaaggtcttaccgatatgttttagacaaaaatatgatgatgccacgcttaggctcaaaacctgtcccactctcgtgagggtaaaataccaaaactctacttggccttttagagactcctgctcaatcaatgcacatattcttcttcattatttttccatctggagtccactcgacttacaacaggcaaattatctcctgatggggactttcacagaagctgtctcctctgtccacgtctccccccagctgctcttcctgtcgccagctcgtcagtcctcagcccggattccactccacactgcaggtggcttccctggggtcagctctgaggttctctttcttttcttttctttttgtttccctccttccttccttctttccttccttccttcctttctttctctctctctccctcccttcctttccttctttctctctttctcttccttccttccttcctttctttctctctctctccctcccttcctttgcttctttctctctttctctttccttccttccttcctttctttctctctctctccctcccttcctttgcttctttctctttctctttcttccttccttccttgcttccttccttcctttctccctcccttccttcctttctttcctttcttttttctctctctccctcccttcctttgcttctttctctctctctttctctttcttccttccttcctttctctcttccttccttccttcccccgctcccttctctttctttctttctctctctctcttctctttctcccttcctttcctttctttccttctctctttctctctctctccctttccttccttcctcccttcctccctttctctctctcttccttctctttctttctttctttctttctttctttctttctttctttctctctcctctttctctctctttctctttctttctttctttctttctctctctttctctctttctctctctttctctctttctttctttttctttctttctttcttgacagagtctcgctctgtcacccaggatggagtgcagtggtgccatctcggctcactgcaacctccgtcttctgggttcaaatgattctcctgcctcagcctcctgagtagctggggttacaggcgcttgccaccacgcctggctaatttttgtatttttagtaga[143 bp omitted]atttttttttttcctctggagcacttactacatcagcagatatggctctcagtgcaacaaaactcacagctctcttacgtggtgtagagttgtccctggaggcagctgccccatgagggaccctatcttcatccttcttgtacccagctgtggactcctgactaattcccacccttggaatgtgagcagcagtgataagcgacattcagattttttatttaaaaggcacggatgagccctttccattctctcttcctctttcccctcactggtgacagagcactccagggttctaggggaggttggatcccaaaggtggaagaatctgggcacctgagtcacctgatggaggagctccaactgccaaccgggggcccctatatggacgtgtaacacgagtgagtagtgaccattccattgtgacaaactgcagatatttcgaggctaatttgttaaaatctaccgttaatgtgctttatatgacttttttttttttttaagatggagttttgcttttgtcgcccaggctggagtgcaatggtgcaatctcggctcaccacaacctctgcctcccggttcaagcgattctcctgcctcagccttttgagtagctgggattgtaggcatgcaccaccaggcctggctactttttttgtatttttagtagagatggggtttcaccatgttggtgaggctggtcttgaactcctgacctcaagtgatcctcctgcctcagcctcccaaagtgctgggattacaggtgtgagccactgtgcccggcctatatgacatttgaatagtcagaggtgtgccctccacattagactgtgaggtccgttgacttgcgtggctcgtctctgacacagactcaagcccttaatagccgcctggaaatgtacgttttggttcacacaaaaaggaagttgaccaagcccccttgatgaagcctcactggggaggtggcccatcgaaggtcgtatattgtgaatggggcgaaggcagcgtcgccgtctccttcaagtctgacctccaggttggtgttcagattccccctccacaccccacagccgtggttgcccgtctggatttggtgtttcggtcagagatgacgttcgggccagtcgtatggatgatgatgtccaaggagacagttctctcctttaccccagtcacgggaaggaagagctaagcctcatggtgccttcctgggagatacgtggtaagaagccacaagacggtcgggactgagtctctgcgcaccgcatcccgagcctctgccatctgcacagcgaggcgggcgcaggcagcacggtgccccttaccatgctttcttcctggactttcccttgaccagtcttggcatggcaggcgagggaatgagggattggggctgggaggcggggaagacagctctctccctgggcccatgtctggttagatcaatgctgtgggagcttagcgactgaagagggagcagagatgatggcaggaaggcattatctgcccaagcctcaggcttcgcagtccaggttgggaccaagagcttgcagacgtcatcgagtgcagattttgagcgaagtactgagcattgtaaatccagatttctcttccagagctgagtctgggccacaggacctggacacaggagggtcagtctctccggtaatggtgagggtctgtcttcttggagcagcacagcggactcccaccaggacagtggatgctggataccgaagggctgggctcaggacagtggatgctgggtacggaagggctgggatgaggacagtggatgctgggtaccaaagggctgggctcaggacagtggatgctgggtactgaagggctgggctcaggacagtggatgctgggtatggaagggctgggctcaggacagtggatgctgggtaccgaagggctgggctgagggggtcactttggcagtggttctggagtctgaatttctaagggcctggaactcatgagactctagatgctgattcttttctggagaacttctccagagtcaccatcctggcttgtgcagactcaacattccacctgaagagctctgggaacctctggggctgggagccttctgggcctgatgagttctgttgggatggagaagatgatcttgaagttaaagatttcagtgggagtccaggaaaacgtcgcagctgtccatcatacccacaacagcaaacgactcaggactttgtcacggccaccgcggcagccaaaaccacagctgtgatctggggctggactcatacccagaggttgtctgggttcaggttctgcaaccccggttcagagaaagaggaaacggagtgggccgtgtggaccccgtccttcatcgaactccagaactaagagaactgggaggggagaaggccgtcacccttgcatggagctgcctccctcagttctagtggtttctacaactccatgcaggttagctaaggtgtgcatgggttccagaaggaacatggagatgtttctctttgatgttacttgaaactttcgtttggcaagttccttctaagatcaggagattcaatcaccccacatggtccatcagtcagggtatcacaacgtcgtgctccttggctatacagtctcaggtacatttcttcttgagattatttttcacgtgaggcagagatgtgtggctgctcaccagaaaaaaagaattctctacttcctcttacagtgcaagcatttgaatctctgggaggtggctaccctcaccaagggacttttttcctagtctcctttgcatccatgtgtgactgaccataatgactacttatagccaaaaatctggacagaaatgatgtgcgtcaatcaattttgcaagtttacaaatattttctgtgtctcctctttctgtttgaagtatgggacgccattgcccaaggggatgatgtgagcacaatggaagaagcggatgtccctgagtcatcctggggagaaaattcaaattctgcccagagaaaccctcattggtcatttacatgagtgagatgccaaacctcactgtgttaagccatcggtattttttcttttttgagatggagtctcgcactgtcgcccaggctggagtgcagtggcgagatctcggctcactgcaagctctgcctccgaggttcaagcgattctcctgcctcagcctcctgagtagctgggactacaggcacccactatcacgcctggctaattttttgcatttttagtagagatggggtt[137 bp omitted]gtcaccctaactcttacctcacaatagtagctaaacaatttgtgatttgctctttgatcctgtccctatcatcattagactcaagctctgttgagggcaggggctgcatctgttttgttcactcctgaatctcaaacaccaagcagataataagcaattgataaatattggttgatcggcttctgaagaaagaaaattcacacatttatatttagaaaaatttataagggaagtagccgagtggggtggcacacgcctgtcatcccagcattttgggaggttgaggtgggtggatcacctgaggtcaggaattcaagactagcgtggctgacgtggggaaaccccgtctctactaaaaatagaaaaattagctggtcgtggtggcatgtgcctgtaatcccagctactcaggaggctgaggcagaagaatcgcttgaacctgggaggcagaggttgcagtgagctgagatggtgccattgcactctagcctgggtgacaagagcgagactctgtctcaaaaaaaaagaagagagaagtttataggtgaagtggcttgtccgaggtctctgaggctgtgggacaggaagtcacaggagaagctcattctggctgacttcccagctggtgttctgcacctctatcagtatcttaggaaccaagttaccacgacacacctattagagtggccaaattctaaaacatggacaataccacatactggcatactggtgaggatgtggagcaacaggaactctcattgctggtgggattgccaaatggtacagtcactttgggagacagtgcggcaatttcttctaaaactaaatgtagctttgccatgtaatccagcaattgcattccttggtatttacccaaggaagtttgaaatgtatgttcacataaagtctgcatatgaatctttacagtagctttattcataatcgcccaaacttggaagcaaccaagatgcccttcagtaagtgagtggattaactatgtgtcgagacaatggaatattatcccatgctaagaagatacaagctctcaagtcatgaaaagacgtggaggagagttcaacgtatatcactacacgaaataagcctgcccaaatggcgtatccactgtctgattccaactatgtgacattctggaagatgcaaaactatagaaagagtgtaaagttcattggttgccagaataaaaggcttgggcaagaggaaatcatcccagtggaaatggagaaacgcaggaacaaatgaagagcaacagaagaagctaaatatttgggtaaagataggaattttgaatgatgatttcatcattaatgaattaaggaaacattgatgcatgctcattctgtatttgatgacattgcaaacagtgttttgaaaactatactttgcactaaaattaaaattgagcgcctgtaatcccagcactttgggaggccaaggcaggtgaatcacctgaggtcaggagttcgagaccagcctggtcaacatggcgaaaccccgtctctgctagaaatacaaaaattggctgggtgtggtggtgggtgcctgttatcccagctattcaggaggctgaagcaggagaatcacttgaactgtggaggcagaggttgcagtgagccgagatggtgccactgccctctagcctgggtgacagagtgagagtctgtctcaacaacagcaacaacaacaacaaaatgacagcatggctcaagtgtgttggctcacgcctgtaatcctagcactttgggaggacaaggtgggtgagcttgagctcaggagtttgagaccagcctgggcaacaagacaaaaccccatctctatcaaacaaaacaaaacaaaacaaaacaaaacaacaacttgcggagcgtggtggtgtgtgcttgtggtcccagctactcaggaggctgaggtgggaggatctctggaccccaggaagtggaggctgcagtgagctgagattgtgctaatgcactccagcctgggtgacggagcgagaccctgtctcaaataaatgaatgaatgaataaataaataaatcttaaagatgacagcctacatatatatacacacacatgccaaactgatacatcgatgagataacactgtatatacaaaagtgcaagggaaatttgttttttttgagacagagtctcactctgtcgcccagactggagtgcaatggcgcaatctcggctcactgcaacctccacctcctgggttcatgccattctcctgcctcagcctcccgagtagttgttactacaggcgcccgccaccacacccagctaattttctgtatttttagtagagatggggtttca[141 bp omitted]cggtacctgaggtaggagggggaaacaggctggagtatacactacagagatagtcatgcttcatcaagcctctgatttccctggagcatgttgacttcacgttgatttttttttttacatgttctgttaaaaaaatttctttaaattggcctttggaaatttaccagcagtgtgctggtaaagtcttgacaatcagctctctgaaaaaaaaagcaaaaagaaaaacaaaaaacaaccccgacgtgtagcatttgccgatttctctggtgtaaatactcacagcatggctttgacatgagttttacatttggtaaaagcaaattgtgcctactttgaatagaaggattgggacagagatatggttcttgtcaggcactaattagggagtaaggcttgtctaatattgccttggctctcaagcaaaataaaaaagtaacatttgggaatctgtgttgcttcctcagcccatcctgggtaaaatcggagacgtatacagggcagggagaagctgtttatttccatgcctgcggttggagcttcttaaggatttgagctgtgatgctggcacctggcagaccacatcctgtgcggttttcagttttgctctgttcctgaccctggtatagcagaagctttttcacatctatgacacccgctatgtcttggtaaaccctggaagggaaaggaggacaaggttaaaatactgttccgaggacctggtctctccacagcgcaggctggaggtggcagcccgtggaaagccaagttcatccaccatcggagcccaggccaggctgccaaggctaatattcaggacaaagccaggcacaggtcgggaatcctatgaagatgatcatcgtcctgaggtcttccttccagggttgcatccgggccagaagatggaaagagaaatgggtgagtccctgctaccaccccaccctcaggttgcttttttggctgaacaagaagggtcctcccaggcaggaagggtggggcacagaaacgtgagccaatgtggatgacttggggagggctttgcagttgaatctcctgaaaacagcaagaagtacagacctccgggcattctagactcagattctgtagacgcttccctttggccgagccaagccagggttgctcaggaactggggtccttgagattggattagattggacggaacgacacaggattgcaacgtgcagaactgtgaggaccggggtttagcttgagttccccagtctgtccacgaggtccaagcttgagatcattacggcgaccacatctcaggaggaagataggtcagcaatgcagtgatggtgctggaatagttttgaaatatttgaactattctaatgcaaactcttcttttaatgacatttcacgttgcatcttatgtcattttatttatgtagatgttgtctttccacttgacatttaattggtgtttaatttaagttgcaaatattgtgtatgtatctgagtctagtgtgagaatcattactctatgcctgtgcatcccacaccaagtaacttttttttctttttttttttttaagatggagtctcgctctgttgtccaggctggagtgcagtggcatgatctcggctcactgcaagctccgtctcctgggttcaagccattctcctgcctcagcctcctgagtagctgagattataggtgcccgccaccaagcccgggtaatttttgtatttttagtagatagggggtttcatcatgttggccaggctggtcttgaactcctgacctcgtgatccgcccaccttggcctcccgaagtgctgggattacaggtgtgagccactgagccccgtccaagtaatgtttttgaatgagtaagctgtgctgtgctgaatctgtagcatgccttggacatagaccttctccagctgggattgaagtcttagaggaatgcaaaggtggaggggccctttgagaatatggaacgacgacagctctgtatcaccccttttatggaaaaacccagaataactgcccatgtgttctgtgacctttgatgttgattctgtcagcaggaggaatcatctgagtagtgaggaaaatcttggatatgttggtggtttcacagctgtcagaattcactgaatggcacagattcaaagaaggcagtttgtctgccaaggattccttgataaagctgattaaaaatcgctaatgaagacctaaagtgaaaagaggcagggaggagaatctaatacatagaaaccattctacacatgaaagaagagtcagaagcaggaaggtcattctcaggagccgctgtgttttggcctcgtgttcaatgctaagtttcaaaacaaatgtagtattccttgcaaccacgagaagttggtgagtgatttgaaatcattcttatgatgaggcggaagcttttggaatctgttctgtacccctgcactttatccttgtcctcatgatttacaaaaccatgaaaataaagctcagttaattcatcatcatcaaggtgagcaccaggttcagtattcagcttgaggctggggactccatctttctttaacttttgactgaatagccttcacttagtttttatatctcttaggcattaaaaaaattaaaaaaatatatatatatattttgagacggagtctagctctgtcgcccaggctggagtgcagtggcatgatctcggctcactgcaacctccgcctcccgggttcccaccattctctcgcctcagcctcccgagtagctgggactacaggcgcccgccaccacgcccggctaaatttttttgtatttttagtagggacggggtttcaccg[131 bp omitted]ttaattggtttattgttattttttggatggattgctgtcttatggacttagtctaacatattcacagaaagttggattagattggaagaacatacctgggactgcattgcgcagaactctttgagggccagggtttagcttgagttcccctgtccgtccatgagatcccagcttgagatcattacagccaccatgtctcgggaggaggactagtctgcaatgcagtgattatgatggaatgtttcaatgtttttgaaatgtttggactattctgatgcaaaaaactttctttttatttttgagacagagtctcactgtgtcgcctagggtggttttttttttcttttttgaaaccctctgttattaagagataaatatgattcccaggaacattgctctgttctgctttattattattggtcatatctggtcatacgccctgaaaaccctgaaaatgggattgctaaaatcgccttaatctaaactccatttccctcccacttgctccctgggcttggagcacaaccactcaaacagaactggcttttggtcagtaaggaagaagtgagcaacggctgcggtgtagaccctcgtcaatgcctgcgacggttacacctggagacaagctccccagtgtcctcaggagcagcggagatgagaatccatgatagggtgggctctgtccccctcagctccgtgatgccgaaatgcactgctggtcctggtcctgctcctcattccacacccggctgagtgcccatctgaccccagacctcaacgcgaggttctaagcactgtctcctgacccttcaaccccttcgggattttgcatgtgctgttggaccacctcactcccacctggagccaaatgacactgtaggaggaggggaagagaacttatgctagtagagtgtgtgtgtgtgtgtgtgtgtgtgtgtgtgtgaatgtgtgtgtgtattatacataatatatataattacaacattgttaatggggccgggcgcggtggctcacacctgtaatcacagcactttgggaggctgagacgggcagatcacatgaggtcaggagttcaagaccagcctggccaacatggtgaaaccccgtctctactaaaatacaaaaattagccgggcatggtggcgtgcgcctgtagtcccggctactcagcaggctgaggcaagagaattgcttgagcctgggaggcggaggttgcagtgagccaagattgcaccactgcactccagcctgggcaacagagtacgactccatctccacacacacatacacacacacacacacacacacaaattgttaattgtatatgtataattataatagtttatatatattaacaattatatataaacttgcatatatatagtatttgctgtattattatatataaacaattatatatgtaatgactgtataaaatagataaacaattttaactaataatattatattaattatattattattagatgtaataattataattatttatatataatatttattattatgtatcattgttagaacacttaacatgagctctgtcctcttaacaaatttcaagtgaacaagacgttattgctgacgatgggtcgtatgtggtgcagcagatctctaggcctgtttgttaataactccccatttccccctcctcccagcccccgtaaccaccattccctgctgtgatgttgtgactctggtgactttgcagatctcctgtaagtgacatcatgcagtacttggtctctgcatctgcgtcgcttggcgtgatgtcctcaggtttcgtctgtgttgtcgcccatggcagaattttcttccttgtttaaggctgaatagtattcccctgtgtgtgcaccacattttctatatcaattcttctatcaatggacatttagatgattttcacgtcttagctattgcgaatagtgctgcagtgatcaggggagttcagacggctctttgcatactgaatttgtttcttttaaatatagacccagaagtggcattgttggaccatacggtagctctatgtttagttttttgaggaacctccccactgttctctatagtgagtgcacaatttttcagcctcccaaagtgctgggatcacaggcgtgagccaccgcgcccggcgcactgtaggatcttttttaatgcattatataccttgctgagattttagcagagatcacaatattaaaaacttggggaaggatttctatgactcttattttaaatacgaggacatgtcgacttctagttttgtaacatcttgcccaagagcggtggtcgttaacgtgtggagttgggatgacatccaagtcagttggttgcacgacctttattctgtcttgtcccatagatttagaaagaggctgacacatcgggtaactagtttaaggtcatctgatcatgcgggtaagcgacatttttcagaaaccaaggccctccctctcatctcactagtgggaagggtggaaagaacagaacagaaagctctccctcttgtgtgaggcagttgctgtggaagccccacgggcaggaggcccccggccagcacatcctgtctgcttgtgtctgctgcagagttctgggaccggggccatgtctccacacctcactgctctcctgggcctaggtgagtcctggagggagcgggaaggactggaaagggggtcgggaggtctggaaagttccctgctcaagcctgactctagtccagaagattctggggaggaaagtgtcctcctccccccaagactgccctactgctctccctggggcctaagtctgatcagagacaaccttgtcctaaaaacaggggcccgggtgtggggatgaggtcagctttaagaagggctggggggccaggcgcggtgctcacacctgtaatcctagcactttgggaggctgaggcaggtggatcacctgaggtcaggagtttgagaccagcctggccaacgtggtgaaactccatctctactaatacaaaaattagccgggcatggtggcgggcacctgtaatcccagctactcgggaggctgaggcaggagaattgcttgaacccgggaggtggaggttgcagtgagctaagatcgcgccactgcactctagcgtgggcgacaagaacaaaactccgtctccaacaacaccaaaaagaagggctgggggagcaggagcctttttggaagaggagactttgggatttatcttgaaaccattttgcagcaagaaggattacatggagacagtgatgtcgaggagggttggcttggtcgttatgaaatgctgaatgccccccagctccgtcaagcccccttttgacagcagccctgtaaggagactgggcagtgggcatttttctcactggggcttctcttccagtgctctgcctggcccagaccatccacacgcaggagggtaagtcatgccttcgtcccgtcttcccagtcccctctgtcaccccaaaggcagtgctgggtgggagtgatgttgattcttagagggcctggagagatccctttaaatataccctagattgcaaactattccaaatgtaaaatgcataaccctcacccctttctctccttcattctccacctgtcatgttttgcttttcttattttcaaaaatcctatattttattttatttttatttttgagatggagtctcactccatcacccaggctagaatgcagtggcataatctcggctcactgcaacctctgctcccagtttcaagcgattctcctgcctcggcctcctgagtagctgggattacaggcacccaccaccacccctggctaattttttttttttttgtatttttagaagagatggggtttcaccatattggccaggctggtctcgaactccttaccttatgatccgcccgcctcagcctcccacagtgctgggattacaggcatgagccactgtgcccagccaaaaatcttatttttaatcgacaaataattgtatatgtttgtggggcacgatgtgatgttacaacgtatgtaaacattgtggaaagattaaataaggctaaataacatatcaatcacatcacatacttattgtgatgagaacatttaaaacctacttttagcaattttgaaatatataataagttattattaactatagtcagcctgctatgcaatagatctcaaaaacttactcctcctgtttaaccgaaactttgtaccatttgatcagtgtctctcccaagccccccatttcccgactttaatagcatcattctaatctctaactctgtgagatgaccttttttgtttgtttgtttgttttgggatggagtctcactctgtcacccaggctggagtgcaatggcacaatctcggttcaccgcaaactcaacttctcaagttcaagcgattctcctgcctcagcctctcgagtagctgggattacaggtgcatgccaccacgcccagctaatttttgtgtttttagtagagatggggtttcaccatgttggccaggctggtcttgaactcctgacctcaggtgatccacccacctcggccacacaaagtgctgggattacaggtatgagccactgcacccggccgagatgaacttttttagattccacatgcggtatttgtctttctgtacccagcttatttcacttagcataatgtcctctggttcatccatgctgttgtgaatgacagaatgtccttccttttttagggctgaataatattccattgcatatatacaccacattctcctcatccattcatttggtggtggttatataactcaggttatttccaggtcttggcagctgtgagtagcgctgcggtcaccctgggagtgcaggcatcacctccacacaccgatttccacaatgagaattcaaacccaacacaaccaaggctgaacccggcacttttccccagacgagcccacacttcactcggcagcttcttggcggggaacgtgacagtcacaaagggcagactctgaacactcatcctcttctccatcctcctggatgcaccatgtcacccagtcctggtgatttcactctaaatttttctcatctttccctctctcttcatcgacttttcctgcatcacccccaggtgacagcccttctcccctccgtggctccccgaggccggcctcagcctgtccatgccactgctgcctgctcccttcctgaccccagggactggcgatttgcaaaagcacaaccatgaccattgtactttccacagtttttaaattgcattcaaaaattttcatttaatatctcatcgtaagatgaagtttttttcttagagcccttcccctgtttatcttcagatagaatcaacccaggcacctctctttgttctggacatgcccattttcccagccacatcctgtccctgtgacctggggctcactcatctctacattcctccaggttctttcgctttctcaaacactccatatgccgctcaacatggtggttcttctcacatgctgatttttttttttttttttgagatggtgtttcattcttgttgcccaggctggagtgcaatggctcggtcttggcttactgcaacctctgcctccctggttgaagcaattctccctgcctcaacctcccaggtagctaggattacaggtgcctgccaccatgcctggctgatgtttttgtatttttagtagagacggggattcaccatgttgatcaggctggtctcgaactcctgacctcaggtgagccgcccacctcggcctcccaaagtactgggattacaggtgtgagacaccgcgcctggtctgatttttaaaagttaattaattcagtttaaaattgaccgatgaaaattgcatgtatttgtcatgtccaatatgacgttgtggactctgcacacagcgaggaatggctacatcgagctaggcaacgtaggcattcctcctgtgcgaatcatttttttgtggtgagaacgcttagaatcacctggattagcaatgtccaataatgtaatacattgttattaactgtagtcaccgtgttgtacatgatgattcttgaattgatttctcctctctaactaaaaccttgtttcctttgaggaattttcccactttgagtgccctggtgtcccctgtctgctcagctcagggagtttctactcctccctcagctctcagctcagagagagcttcccctgactttgcagaggaggtcagctccaccgcccacctgtcccctagatccctgcacacttacccacaggaaacttattgcagttcgcagctgcagatttggacaattcttcgatcaatatctgtcctcccttctagacgtccacctccaaagggcaggcatcctgtatgtgtttctcacatttgcggaattagcagctcatgaaaagcgtctttaaacagattgataagtaactgagatatggttaaaagaaagaaaaatgaacaaatgggtgggtttggggagatgctggtcaaaggatagaaaatttcgtctagacagggagagtaagttcaggattgtgtaacataatgactagagttaatcacaatatatcatacgcttgaaaatcgctaagagggcagattttaaatgttctcaccacaacaattaactacgcaaagtgaggttatattaattagcttgattcagcgattccacagtgtatacctgtatcaaaacatcatgttgtacaccttaaatacatgcagttttaatttgtcaataataaggaatgaatgaagacgggacgagtgaattgaagccctgccagctctctgccccgctcagggattttgctaattttgacacaaccttcctgtttcagggcgtcaaacccgcccttcctcctccaccccaagcccagttgagataaatggggtttttcaagagccttaataacaaggaaatgcaaattaagctgagaagaaagtagaaactatagaggaaaacccagaggtggtgtctccacagagatctgcattagcaatggggacctgtcacgggctgggcatctgctgtgagcagatcagggctgggggcttcaccctcaccccaccagaccctcaaaggagcctggcaacccccgtcccacactcagtcccacccggggaccggccagtgcccttcaggccccagcacgagccatctccagagccctcgcttccctgtcccttgtccttcacgaatgaccctgtcatccccatcgtgtgcctccctcccaccctctgtccctctagaaagtggccctgggctctgcagcaggcatgaagggctccaggctgctccgacacttcccacgtgaccctgagcaaggcccaagttgtgagcaagtctcagggtcctcactgtcaactgggaaaaaactctgcagtgatgagaatcacatgcacgtagaaggtgcaggaggcgtgggaatgttctaaggttgggctgtggtcgtggctgcataactctataaaattgctaaaatccctgaattgtgatcctaaaatgacgtgtgtggcatggtgacttcctacagtggacgctgagatccttctttgcttccctcttaggggcccttcccagaccctccatctcggctgagccaggcactgtgatctccccggggagccatgtgactttcatgtgccggggcccggttggggttcaaacattccgcctggagagggaggatagagccaagtacaaagatagttataatgtgtttcgacttggtccatctgagtcagaggccagattccacattgactcagtaagtgaaggaaatgccgggctttatcgctgcctctattataagccccctggatggtctgagcacagtgacttcctggagctgctggtgaaaggtgaggacgtcacctgggccctgccccagtctcagctcgaccctcgagcttgtcccgaggtccctggtccctgtcccggctgctgtcctctctctgtggccaccgttgccctcttcctgaccccaagccctcccctccccttcttcctctgcacacacctcccctctgccctcacacctgcttaggtccctggagccctgatctcctctggacgccacagatggcgtggacactcagtcccagcattgggttggctcagagctggctctgcttggctgggtggggagtgggttcccagagattagggggcaacccccctacaaggggatgagtgtcttttcacacaggattgatggtcccatttgttattcctttccactgagccagaacctgccccaggcaatgtgcttctcctggtgtggttcatctcccactgggcagaacacagggtccagggatggcccctgaccagggcgggacagtgctttgggaaaacctttggtatgtgaccacatgcactcctgtgtgtgctcagcccgagatgtcctggagtcaaagtccactggagaggatccaacccatcttcatgtccccccaggacctcagcagtcccctgaggtcaagaagagcttgtggtgggaggagcagagggagtgaccagccccagggagaatggggcaagcagcggggctctccccagcctcctgtcccctgccccgttttctcaggagtctcgagacattgtctgggattgcgtgatggtcatgcggcctttggatgggggctcagggtggaggagggcaggttggttgggacgggttctaaatccttctcctgcccctgtttacagaaagctctggaggcccggactccccggacacagagcccggctcctcagctggtcagtagcagggccctcagctggaggggattacaggggaatctgtgctgcggatgctgttccgggtccagccctctgccctgggcttggagtcaaggtctagggaggccacgggaaggcaccgacacccaccaagctctgggaggtcgctaatgctcacagagaccatagcagcaatggtacagtgattgcaaccttgttccatgccaggaactgtggaaagcacttaatgcaagcaccacttaatgggggaggtactagtctgatcctctaactcctcctcctctctaatatgcaaaacataaattaaagtttcgtgcttaacggcacaaggccatgaaggggcaggggccacccacccgggcagccccaccccagacttccgggctctcccgagctccacgctgcccccttgtgggcgtggcctcaccattcaccccgctctgcacctgatggagggacttagaactcaccttccaacctgggacacccggagagggacggggctgctcctgttggctctgtgatctccgggggaggcctgaacggtggagtaaggtcccttaagaggaggagggctccacagggaggggacgtagctgtgaacggtgaccaggatgaagccatgaggcttcccttccatctggctctgccctggactctgtgatgggagagaagctgcctctggctctgcccctggactctgtgtgatgggagtgaagctgccccaagtccctgggtctcaagttgtccatctccgcctgtgatctgtgaccagaaactgccaggggaggacacggggtcataagccattcgcggccccttccccacctgggtttctatccccagagtacgtccttggacctagacccggtgactgcctgtgaggctcgggctgtgagctcaggcaggtgggaccaggggctgaagccacatggggaggtgggaggagcgatgccgtgctccatccggaccccctcagaggctcctgggctgctggggcacagcgggacatgctcctgagtcccgcagacctggttcaagtccagtgtctggtttttattagccttctgtctgcgggaatatcttgcctctgtttctctccctctcttcttctccttccttctctcttctctcaccttcatgcagtgacatataaaggtcacgagggcagaccctcctgcagccagattgctgggttcatggttcaaatcccggtggttctgccaccccctggctctatgcctgacggtgactcacccaaacctcctgtgtcccaaattcctcatgtgaaacagaggcaatagaagagctgtcctggtagaatcgtttagggcagacttgagttcaggtacacacggcgctgacatcagtgctgattagaaaaccccaaaggagggatgctcctattaatactgaggaagtattttgtcctcacagggactgtgccaggcactgaagcctccggatttgatgcaccatgaatgaggagaaatggcctcccgtcttgtgaacttcaatggggagaaataattagaatgagcaatagaaatgcacagatgcctatacatacatatacaaataaaaagatacgattcgcaatggagaatttcagacctatcatttcaattatattaaatatgttcacgtaatgtattacatatataaggaacataattatataataaaaatatgttaacatatcaccacatatcactataattatattatatgaaagatttatttacaatatatagtacaataaatttcaggtgttattataattaataaacaggtacaaacataaatatatattatctattatttatagattataattataatagaaaaattttatatttaattatatgtttatatgtaatatacattatacattatatattatagtgaatatatgcaacatatattataagtataaatcatatacaattaacattatatacattaaattatgatgtatatgtcaagattacataatttaatatatatttgttatatattatacgtttgcataatacatgatacatataactataaataatataaaaactgtaatattgcacatatataatacatatgtaattttaaatggtggcaaatgttatgaagaccaagcccaggaagtcatggtgtagaataacgggtggtgtcctggaccttggaccgtggaggaggcaggagggaaggacattccaagagagaatgtctgcctttcttgaaggatattgaagatgctgcctcggcagtgggggaggggagggacgctgttcctggaagagggacgcttggctcggaccctgggtttgggggagcccctcaggaccgcatttagccacctgggaattgggtagtggcgtgcactgtgcagaggagggtgaaggttggaggagatgacgggcggcctgcaatgcgccagatgcctgggatctcggctcgctgcaacctccacctcccgggttcaagcgattctcttgcctcagcctgccgagcagctgggactacaggcacgcgccaccacgtcgggctaatttttgtatttttagtagagacggggttccactatgttggccaggctggtctggaactcctgacctcaggtgatccgcccgcgtcagcctcccagagtgctgggattacaggcgtgagccaccgcgcctggccgatatatataatttttaaaacttcaacaagagctcagccagttctttctatggggcaattgctaatttagttctatgcaaatatcgacacattaagtccttgtacacactgtcctcagcgtgccttattattttcccccctttcctcagagaaactatcgactgagacatggagcaacctctccaaggttagccaggtctcaggggcaggggctgcctgaactccaggacaggctgcagctcaccgcgctgggaggtttctgccctgccatactctcaaattttaattt[274 bp omitted]actgctgggattacaagcgtgagccaccgcgcccggccgagctttaattttctatttgtgctcaagtttaatttccttccaggatctgtttcctagacctgtgctctttatttttgccttcttctgttacatgatgactgattttctctgttctttatgtgggacacattctccctgctctctctgtgtgtgtgtgtggtgtgcgtgtctctgcatctctgtatctctgtctttcttctctctggttgtttttcaactattagcgcagtgtcttctcccatcacgtcttgtttgtttggcttggaccctgaggtggacaggtgggtaaatgaggccttcagcaaagggtggcagcttgaccttagcagaggaggctgtgtgaatttttctaccccttgcagagcacaggagggctgagccgacccccgtacctgctccagtgtaaggaagtccaggatgtgcaggcagccaggccacagtgaaaagcaggacagtcatggtttaagggaaattaaacaaaagcacccaactgttcttttgtggggattggtggaaagaggatgggtccaggcagaggacagaaaagcagaggcagcgactcatcttttcttctggatcctccaacccgcccaatgcaggggctgggactcagcgcgatgggtctggggacactgctgtatggagaggatgtccctcctgctccaccgcccccaagcccacctggaggaggagccacgtttaacacacccggtggtgcagtgtggccaggcagagagggaaggcccaccctgtgatcatgaccgcaccctaattcccctgaggagtgtcctgggggtgaacatcagggggctgcagtggggcccaacatggaggggaggggaggcctcacttgggccagatggggcagcagcagatactcacaaatgtccctgaatccctgggactaagtggacattgagtcaacaagaagggtccccaggccttgagggagcagagagaggaaggaaggacaaatggctatcaggtacagacatcagtgggatccccccggcaatctagtaagcaaaccccacagaccccagtcagctcaggcccaaagcccaaaggccagcaggagggcacagaaccactgtcccaagcatcacctttgaaccctgcttcctccatattgggcactaccctgggaaggagctcaggagagagggaaagtgggaaggggaaatcatactaaagaaagtgaaaaatgattgtgaagggctgagtttaaactccagggagtgtgtgcgtgttcaccaggggcagcttatgaggaagagtgacatcaatgatagaagacgtatttctttttttcttttctttcttttctttttttttttttttgagacggagtcttgctctgtcgcccaggctggagtgcagtggcacaatctcggctcactgcaagctccgctcccaggttcccaccattctcctgcctcagcctcccgagtagctgggactacaggcacccaccacc[176 bp omitted]ctgatctgttgcacacacacacgcgaagccacaccaacacatacacggatggaatcctcactggcgtgcaatgctatttaactcctcaggtattaactacctaaggaaagaaatgtaattcattggatttttgatgatgcttcagtgaaataaaccagagtctgttccatcgaaaatgccaggtaaacgttgactatttttatttttctctgttttatcatgcatatataacaggcttccccccccaacagggtcaatattttacgggcccttttataaactgcttgttctgttaaaaattcaccagaagcatccctccttctgttgcacgtccgcaatgagccctcagtttgtagcacatcccacactgcacaccctcctgaaaaatgcttggtttgtgtgataacatgccctgtccctttctctctccaccaggcttttccatgtggagaaacgtcacttaaaatgtttcacatttgatagggagtcagtggcgctatgtatggactgtgcttcagtttctttgcatgtggtttttttttttttttttttttttttttttttttttttttgagacggagtcttgctctgtcacccaggctggagtgcagtgacatgatcttggctcattgcaacctccacctcccaggttcaagcgattctcctgcctcagcctcctgagtagagtagctgggattacaggcatgtgtcaccacacctggctaatttttgtatttttagtagagatggggtttcatcctgttgaccaggctggtctcgaactcctgacctcaagtgatctgccccaccttggcctcccaaagtgctaggattacaggcgagagtcactgtgcctggccaaaatgtggagaattttaataggtattttgttgccgaccttttcttcctgtttccttggggattcgggtggttactttcacacagaaagaaaacagcttttcctgaggacagtggttcccaccatggaactgagacacgctgagcgtgtgagagatgcccagagtggcagtcatggcatcctgatctgcagaccacttctcggcttctgtccagagcagaggccaggtgtctggacttccctttctcagaccgttggaccagctgggcagggtgttgaagaaaaaaaaaatccagtgtcacttgttgaggcacaataaggaggacattattcaggactattgctgtaggtacagggaccatggtgatggaattgcacagtgtgggaaagagactgggctcaactctgagtagaacaggaaaagtgggaatttgtagccttggagcagggtgagcggggtcagtcagtggaaaattgctaagagaagtcctcaggggttaagaagaccctggctaaaccgacccagcaggattcttgctgaaggcaggccaaggcggccagacatcacctgaggctgatggagaatgaaggttcttacctgtgaaccatctgattaagggtgatcagatatctagagttaaactgactctgcaggattctttcttaagtaagaattggaaaagagttgcaattcttactaaaattgggcaaagcagagataaacatggaagcccagaggtcagggctcgttggaaaagagctcagaggagcctgagtcgagcatggtcaaggagatcgtctatctgaagggagaacgtagagcctgggcaggtgttggggaggagggtttagaccaagaatcacaaagctcatgggccttgcttcatggagggatcacagacccaagagcttcattctcttcttcttgaagaaatgtgaccactggggctgggtctctcctgggcttgagagtgaggtctggggaaacccacaggtctgtgcccttggagaggcttagcccacctgttcccaggaggacaccacagccaacagtgagaacctgtcctccatctctatcagactacaccttgctgaccccaagaaccagaagggagtgtcttcccctaggaccccagctctgctgggagacctctcgtacccatggcctctgccagtcactctcacctgtgaccctaaaaagtctcaagcccttctctgcatgttcctaattcttggtccatcctatcctcttggggatggccctttgcatggaacatcactgcaggcctcaggaaccccaggacagagcagagtcctccgcttcctccatcctgtgagcaggtgacttgggatttcagatgaggctggcagtgactggagatttcggaatctgacagatgcttttaactacctggaaggactgtgccctaagagacagaagatatgagaagcatgagaatccactgaaatgtaaagggctttagagctacaagagaagctctaaaaagacaaggaaatgcagaaagcccccagttcctcagtggcttgggagggaggtgcagacttcctgactatacaggagatgatgggaagactcattacggatgggggctaggagaccacccttccttagttacgtgttttgtgctgtgtcttgacaagagagatgaatcagggtcctaggtgagaattcaccaccatccaagacctaaatgggtgtgtgtagactctgaagtccaagaagttctgccgaccgacgtctgcacaaaccactctcagcaaaacaaccactagagtaatccagggtttcagaaagagttggtcttttccaatctagcggagaatatcttctcccagtgagagagggacacacacacacacacacacacacacatacacacacagtattggctctgttttctctgaagtgtgtggcctttttttttttaaggtgttgtagattacttggaactaaatagaggtgatggttgaagaagattatgaatgcaccaaattccactgatttgtacacttttacatagttaatggttagttttatgtttgcgtactttattacaataaaaagtaatgatatagtatttgtagagcaagtagcaaagtcccaatatgagtagaatcttatcatgctcataatttatacacacagtgcattgaaataagacactattttcggacaggcgcggtggctcatgcctgtaatcccagcactttgggaggctgaagcgggaggatcacaaggttaggagtttgagacaagcctgactaacatggtgaaactctgtcttcactaaaaatacaaaaattagccgggcatggtggcgtgagcctgtaatcccatctactcaggaggctgaggcaggaaaatcacttgaaccagggaggcggaggttgcagtgagccgagatcatgccattgcactccagcctgcgtgacagagtgagactccatctcaaaaaaaaaaaacaaaacaaaacactattttctattaccaaggcaaggccagagtgattccctttttgcttcctctctgcccacgatggtgtacagtagaaaaaaaaatggccttatccagatgtcaagattccatagttcatatgaacatcatctacaccttgagcttctccacctcttgctaaattctgactcctattccaaatgttcccaatatatctggccctatatctagacaccattcctatttcccctgtctggatgcagtccaaggagagtggttcttgcggttactgtttacagtactgactgggatgctggcgcctgtctgtagtttcagcaccatggccagcgtccaggaagccacacagctttctccattgtcgtctcttagttgatcatttgcatatgctgagtccctatcttgggactctgaaatagagtcttcctggaaaaatctaatcagtaacttttttttcagggcaatattcaggcattagggtaaattggaaaaagaggatgccagttgttaaggcgatgtttttggaaaaaaaataacccttacattccatggattctgcaagcaagtagaatggcctgttgtggggtcgggggtgggggagggggagggacagcattaggagatatacctagtgtaaatgacgagttaatgggtgcagcacaccaacatggcacatgtatacatatgtaacaaacctgcacattgtgcacatgtacactagaccttaaagtatatacattaaaaaaaagctcagaatgtgggctcccacactcatcaggacaactagaataatccagggtgtcagaaagagttggttctctccaatctagctgagaatatctcttcccggactttcaagataccagctattgggtaatggccaaacgacaacaggctttaaatcacaccaaactgctttcaaaacctgaatctgaccttgctatctttatgtgcttgggagagtcacattacctgtctaagactcactttgcttttccataaaatggcactaataatgctgtctgctttgtaagcatgtttggaagacggatgatcggggattattatattctgcctctctgtttagctaggagggaaggctccggagccaggaaggctgggatatgatcattgctttgtctctgaaaactatgagatttaggaaaattacccacttgactcaattttgtcatttataaaatgagggcaatgccagtacctaccttatatagagttttggtggagaacacatagttactgcatgtgacgtgcaaagtaaactctgaacatgttgttagactcactcaataatgtgggctattgtgatcactactataatgttactctaaaaacgatgataatattatcatagttttgtggctacacagagcctgataaactttgctcagtaataatacctgtttttatgaatcattgttaacattttcttgaaggtccttggacatctgacatattccctgatttactttccaaagttctgggctccccatctcaagcttacagacttagcctggacggatgccggcatttgtttttttcaaatatttactcagcaacatctcctgggactcgggactctgatgtgccacatcctgtataggaaacaggtgatgtggaaatgagtcagactcagctcctgcccctgacagactctgacagagaaatctgcaatgcactgataagactctgctaccagaagcttaggcgctgctgaaacgcaaaagagataccaatttatcttttcctaaggagtgaaggaaagccccttggccatgaaaacccctcagatggtaccaaaaatatagacaattgatccagagaggaaaagaggggaaggaaagagtagagagcatcctcaaatgagagagcagtgtattcggaagcatcagtagctatgagaagctacaggctcaaacaaggggaaagatttaggaggagaattattctcaattgctggagtgaggggttgagccaaataggttaaattaaaattttcattgttgaccatggaagggctgcgcactggggcaataggagaaacctccaggagtgttcagggaaagaaagcaattaaacgtggatcatgttttttgttgttgtttttgttttttgtttttttttctgagatgaagtctcgctttgtcgcccaggctggagtgccatggtgtgatcttggctcactgcaacctccacctcccgggttcaagtgattctcctgcctcagcttctggagtagctgggattacagtcatgcaccacaa[134 bp omitted]gcctggccagataaatttttaaaagagagggagatttggctgggcatagtggctcacgtctgtaatcccagcactttgagagactgaggtgggtggatcacctgaggtcaggagttcgagaacagcctggccaacatggctaaactccatctctactaaaaatacaaaaattagccaagcatagtggcaggtgcctgtaaccctagctactcaggaggttgaggcagacgaatcgcttgaacccgggaggcagaggttgcagtgagccgagatcacaccactgcactccagcctgcaatagagagagactccatctcaaaaaaataaaataaaataagaagatgactgtgggaatggtaaactgatttccaggatgggatacccaaaaggcactgcagacctggggagagggtagcagcaatattgactttcattgtggacacggcgagtagaaaagtcctgtagggaactctataggttcttgcctaagggaagagtcacaaagctgttggacagaaatggaaacactaccaaaagcatcaacggagaagagaaaaaggaaaagagtacaagggatggggatagggtagaaaaggatgattctcaacaagtcaggatttctcctacccaaacatctatggtatacacctgccactccttgccaatacttttgtcattatatatatatttgagacagagtcttgccctgtcgcccaggttggagtgcaatggcgcaatctcggctcactgcagcctccaactcccgggttcaagtgattctcctgcctcagcctcccgagtagctgggattacagtcacccaccaccacaccctgctaatttttgtatttctttatttatttttttagtagagacagggtttcaccatattggccaggctggtctccaactcctgaccttgtgatccacccaccttggcctcccaaagtcctgggattacaggcgtgagccactgcgcctggcctacaaatgtgttaatatctcagggtgtgtgtgtgtgtctggggagggccaggtggttttctgtgctgagtttgctctgtagggaagagctgtgttttctggggctgtagagtttagctcagtcctgatcatcagcaatacgaatgtcaaacaggaaggcttgtgtcttatttggatgaagatgcagacctgtggaaggattttgatcagggccagaaacaggaaagtttggggctatgagaattaatagacatcagcagcagtgagggtctggagtagggggctgggaggaggctgatgtggtgacagagacacgatgtcttcagtctccagctgagcttggactgtggggatgggtcaggggacgtgggtgaggagggactcggggaaagagctgtttggatttgttcacggtgtggggagcagaagagcgtgaggaactgagagttgctccagtctctgccttggttcactggaggagccgatggggctgtctcgggatggatgaccccaggagaagcagcaggcaggggaggtgttgataagatggataactggcctcagagaaagcagagcctccctccaagcccgagtgtgtggttttgttcctcccaaacacttccttcatctgacttcctttgttctataattagcagcaccttctcttcattcttctctttcaaaacctctgattcatttctacctcctcactacagtgtgttttctgaaagttctcaaagcacagactaattcccattttccaggagaaccacacatttcatatggcttcaagccagacaatgggaatccacgcagagagaacatgcacgcacacaaacaggaaggacgcagacgggctttgggggtgacgagggacagcttcaccctgaggtctcaggcgaggggtgaggaaggagactcatgtgaactcctctgtctctgctctcaggcttgttcacaaaaccctgcatctcagcgcacccaagccccctggtgcacgcaagagccagcgtgagcctgcgctgtcactcagagctggcctttgatgaatttatcttatacaaagaggggcacacacaacattcccagcagtatggtaggatgatccaggctggggatcactccttcaaggctgtcttttccatgggtcctataacgcctgcccgtgcagaagcctataggtgctgtggctgtttcagtcactcctgctatgagtggtcggctcccagtgaccccctggacattgtgatcacaggtgagtgtggctggaccattcatggtcttttggtgcccaggaaactccccagggtgatgtggttgttgatcaaaccgccagtagaggaagaaaaataccagaacatagaaacaccaagtaacttattagagggccagaggaggggatgaaggaaagggggagaaacagagaacttgtgatagttaaagagaaaacaagttagacagtgacagagaatgtgaaacagatattgagagagattcgcaaacatagacaatgcctcctcctgacctctcacctgtgtcctcaatgcctcctcctgacctctcacctgtgtcctcagtgcatcctcctgacctctcacctgtgtcttcagtgcctcctcctgacctctcacctgtgtcctcagtgcctcctcctgaccactcacctgtgtcctcaaacatcacttcctcatgactccctttccgcaacagaagagctatgccagtctattttctaatcacccacagccaaggaatgattccacatacgaatgtcatagtgcgtagttacctgttttgtagttatttctagacatctatcacatcccctagactagcagggctcacaggacaggatccatgtcagtgaagcgtatgctttatttttcattcttggttaattgtatgaaataaggttgacatttatagacatatgctggcagaatggatggaagcatggatggactataaatggacagacacagagggaagagttgatgatgtattcagtattcaaatgcacacttaaaatctgtcgtatatcaagccagcaacctctcctgctgctttcccccttgaattctgggatattcagctctgctctcagtttcctggctcagggatttcctccttgtccattttgcccaggtgagacgcacacagagatcacaaactcagatcagcctgacaaatcctaaagcaaaatcatacctgcagcattgactatataatccactggaccccatgcaaaatgaaaatagagggccccatgttcaaacatcaagatgtcaacacgagggcattaaactcagcttggaactctgatggcacggctcctggacagtgaagccagccctgcacagagacataagcaattgggggattgcacacagcatataccaggcacctcgagatcccagagctgcatgcacccaacacacgccaggtattccagatgcatcagacagaaagtgcccctggaggtgatggttgcagatctgggggcctccaaagcccacttcgccactctctgcttcagtcgtcatactggacatggactgtgtccctgcacagaccctgtgtatacctagtccgttcactgcactgcagggactcagacttggtaactgagtgtatgaatgtgtatgaatgaaaatagcatgttgattgtgttggattatctttacttaacaaagtggcatgcagttttatgaagttttaaatggaataaatagtgacgtcttcacataagcctccttaggaagtgactaatatcacccacgcttacaggatgaggaggttgagcttcacagcttgtgcagcaggctgagagtcacggagcaaacaggccgcagatcctggaatgagcccaggctggcagaggtcagaacccagtcttgtgaccacaatgctttgccacctgtgttagcttcctggggctgtcctaacaaagtcctgcaatctgcgtggcttaacaccacaaaatcaattcacttataatcctgggaagtagaagtttgcaagtaaggtgtcaaggaggccatgcccactctgtaggttctaggaaagaatccttccacatcccccccaccttttttttttttttgagacagagtcttgctctgtcacccagatctgtggagcgatcttctctcactgcaacctgcacatcctgggttcaagtgattctcatgcctcagcctcccgagtagctgggactacaggtgtgcaccaccacacctggctaatttttgtatttttttaatttaatttttttttgagagagagtttcactcttggcatccaggctggaatgcaatggtgagatcttggctcactgcaacctctgcctcctgggttcaagtgattctcctgcctcagcctcccaagcagctgggactacaggcatgcgccatcatgcccagctaatttttgtatttttagtagagatggggtttcaccagctggttttggccaggctggtttcaaacacgtgatgtcaagtgatctgcccaccttggcctcccaaagtgctggcattacaggtgtgagacacttcctggccccaaatcattcattcattcatttattcattcttcattgagtcattcggtaattccccgtatagttactaatcactaaatgtgtgccaagtacggggctcctcacttcgtacaattacggtatattgtagacacaaagagtgtcttcatggtgggaactggaggagaaacaatgaaaaagtggagaaatagaaataaatgacatcaatgataaattttatgaaagaaaatgttaaaactaaaccatgaaaactaatacagaagcctacttgcctacggtggtaaggaaagaaatcttggagctggtgatatttgcactcaacagtgatatgaggtgtggggagagggatggaagttgagatagagagaagagcacgtgcaaaagtcctggggtgagggaaatgtgaaggatccatttcttttgctgtaaataagacaacatactgtcctgagtgtacgtgggtatttataaagtaataatatttatctaaaacttggagtgaagtatctgaatgaacgtatgcttcgagtaagggttataaaccattgtgtctatttatgtacagatgagaataccacatattccagccctgccgtgaaggaaaggtggaatcagagatgaggaatcttcagctcagataggagacacacagaaaggtttgcatgtggaagtgccagcctgtcaacctctccagaggctccagaagtgaggccagaattttgatgataggagatagactttggaggtcatcacccacatcccctgtcatggtcactgtcattgtccctattccaggcagtcagaaggaaaaatgaaggatgaacataatgcgttgggttcaatgggccagggctggaagcagccacctctcctgggcaaagcctcaatttcacagatcttctcaggtgagaattgaatcactgcaaatgaaaagcttgcccttgggttgtgtcgacaggtttgaagcaggcagggaaatctattcatggcagagatataaacggtccctttattctatgggtggatgtggatcaagaattctagacacacagggtgaagcctgtgtccaaactaataggaccttcacactgttttcagcatggagagctcacaagtattggaggattgggagaatggggtgtctagaataacgtaaagcaacaggaagcttgattcacccagatgggtaacctgagcatatgccctcctatggatcagctcaggaattccacgctggcttcaacacaaaggccttttcacccgtgcttgctaacattcagattcccattaaagatgtgtgtttttaattaatcatttcaaataaaaccttgacattattttgcattaatttttcatgtttaagtaattggtttaatcgagaaacggaagtgcatgaggcagatactaagttagttaggtcattgcaaatatttagttggacttttatcatccctcggcctcagattttctgaagcctctgatgccgttcacccctctgacctacgtgaaagtagctcttatcttgttcaccttttggaccttgtttcaaaagtaatgatagaaatgagcagtccagttgagaaaacaagatactctgggagggtaggtgctgaaaattcttggagaaaccaaagctgaagacaagactctcaatcaattgatcttggcaaggaattgtgttttctctcttcactgtttaatactggtcaatacaattatggatgttttgatctggagtgattctttgttaacatctctcgtattcatccagagaatgtaaataagggcataaaacaaatgtaaatattcctatgataaaataattattctgctatggagaatattggatcttgctccttagcgtgggttatttgggtgaaacactgagaaacatgaatgtcaaagagtcctacactgtgaaaccccgtctctactaaaaatacacacacacacactcacacacacaaatttgccgggcgtggtggtgggcgcctgtagtcccagctactcagaaggctgaggcaggagaatggtgtgaacccgggaggcggagcttgcagtgagccgagatcgcgccactgcactccagcctgggggacagagtgagactccgtctcaaaaaaaaacaaaaacaaaaacaaaaaaacagtcctaagctttctaggaccaaggaagcagctactcactcgcaatcgctagagtgttcccatcttccaacacccaccttgattttctctagtccagcaatgagtcaggtctcagcatggtcgaagcagggaaggagcatctcatgctgctttccttgtggtcataccttgccaatgccacttccagaggcaggtttttcattccttctttcagctttcagggtctggatactctgaggacactggttttgcctctgtgcattgatgaatgcctccgttaatctgcaagtgaagagtaaggaaattgcttttcacacattacttagagggcttttggtactgtcagcgaaggacacttgtctgatgatatcgatgtcaaccacaacttgcaaaatatcccatagactcaaattttaggaaactattctaaccaaagctcatcatctgaaagctgttgctctatgcacagggtcctgggcttctctgtgtgtggctcttccccccacacaggagacccatcctctcgtgagatcttcaccctgcgcaggagacccgtcctctcccgagatcttcgccccgcgcgggagatccggcctctcccgagatcttcaccccacgtaggagacaggtcctctcgcgagatcatcaccccatgcaggagacccgtcctctcgcgaaatctgcacccctagcatgagattccctcctatcgcgagatcttcacccaactcaagagacccgtcctctcccgagatcttcaaggcacgcggaagacccgtcctctcgcgagatcttccatgcgatggctcctgcctctgctcatatccaaactcctcctcagccaggtgtctgatgactccactgccatcatcccagaaatttgttcctagagaacacaaacaaatttcttctctattcttcataccaaagaaaatactatgatatttctgcatgtttatattattgttaagtgaacggcagtaattgcttatcttccaaaacgaagagctgagtaatgatatatctttaaactccatccttttgacagtgattgaaatggacaaaacagtagaaagtagagctgatatgtgtgatcacttttaatgacacagattaacagtgaaaaccacaaagacctgtggtacttgtatctaggtagtagaacattggcctgtaaacacagcacttcgggaggccgaggcaggtggattgcctgaggtcaggagttcgacaccagcctgcacaacatggcgaaaccccgtgtctactaatgatacaaaaaattagctgggcatggtggtgcaaacctgtaatcccagctactcgggaggctgccagatccagccacgagacacctttcaaaaaaaaaaaagaacttggtgtataagataatttttacactgccataaagaactacctgagactgggtaatttatgaagaagagaggtttaattgactcacagttccacagacttaacaggaagcatgactgggaggcctcaggaaacttacaatcatggcggatgttgaaggggaagcggggaccttcttctcatggctgcaggataaagagagaaccaggggagacgtgtcacactttcaaaccaccagctcttgtgagaactcatgatcatgagaacagcaagtgagaaatctgcccccatgatccaatcatctctcactgggcccccctccaatacatggaaactgcaattctagatgagatttgggaggggacatagccaaatcatatcattttgcccctggcccctcccaaatctcgtgaccttctcacatttcaaaaccaatcatgccttcccaacagttcccaaagtcttagctcattccagcatgaattcacaagtccaagtccaaagtctcatctaagacaaggcaagtctcttccccgtataagcctgtaaaattaaaaacaagttagctacttccaagatacaatggggatataggcactgggtgaatgtttccattccaaatgggagaaattatccaaagccaaggggccacaggccgtgtggtgatgggtttgtaggtgcagcaaaccaccagggcacaagtttacttatgtggcaaacctgcacgtcctggacatgtaccctggaacttaaaataaacaaaataacattgattataaaaagatatgaggcctagagaatcccaggaatacctccgccgaaccccacaacccacaaccccagtgtcactaggttgctgggacaacactggcactacctgcctcaaaacttattgtgaagtgaaacattaaatgtctttattattaaaacaaaaggagagaatgacaatgatcgtaacaaatactttcaagctttatggacatatacaaattgtacatatttggtgggtggaatatgatgttttgatgtatgtgaaataattaccacaatcgagctaacaagaaagtgtctctcccctcacagggttatcatttttgtcttcatttttttttatgtggtgagaatatgtaagacgtatcctgttagcaaatttcaggtgtgtaatacagtctttttacactatagtcaggcgggttttgagtgtgggaaatgaggacacgttggtcaaaggctacaaagtttggttatgcaggatgaaaatgttctagagatctaatgtaagcatggtgacgatagctcacagagcttccgatggaagaggctattttgtgtgcagattttgccttgctccaagatggcaaaactgcagaagaaattgtccaatgggcagaagaaactggaggtttattgggatgtgttgacttccctccaccaattgaagataagagatgaccagaattcaaggtgctgcctacttcacgttagtattgaggaaggagctcattcctcttaacaatgaagagtaatcagattttaaactgtcatggttgctgtaaagaaaaagcaaagcgtaaatataccctaataaaatttttgtgtataagaagggaaactattcagaaagtgaaagtgatacaaatatgagatagccccagagaaatttgaggcacctcgagtttctttcaaaaataaaatgcaattgggaagccaaggcaggcggatcacctgaggtcaggagttcgagaccagcctgcccaacatggcgaaaccccgtctgtactaaaattacaaaatattagctggcgtggtggtgggggtctgtaatcccagctattcggtaggctgaggcaggagaatctcttaaacctgggaggcagaggttgcagtgagccgagatcatgccactgcaccccagcctgggcgacaagagtgaaacttcgtcttaaaataaataaatgaataaataaataaataaaatgcattaaaacaccaaaacatagaaatgttatataagttagaagagttatttccctcattttaatgatgctaaaagtgaggtaaaaataaaaagaaattcgtgaatttataagaaatgtattaaataagtgaaacatattaaaatacagaaaagataaagtaactgtagctggaaacagagagaggcatgcttgcagaaagtatataaaaagggatggaaacatatacatatttaaaaaataatcagccagggtacagtcatatgaagacagatcaagaacacccaatgtttttaaaattggaatttttgaagaagagaacgcaagcaaggaatagataggatctagtttatttgtccaggatccatatttgaaaaattcaggtatggcttatttctgaccttctgaatttactcttttatatgtttttccagaggaatccataagcctgttaggagattaggctacgaaatttctttaaatgtacctcaagtgaatagaaccttttaaatcatcatgaatggacacgaaactcaccactggctcttgcctgcaagagccttgtttctttacctaattcatcaactatttgtatttattgtttgggcagcacttctggaaaatttgcacgatatacctaagatctacagatgatgtgggtccttctggaaataattcatgaaggaaaatagtttaaagacatactaattaccatgtaatgcatcacgggcattcaatatttagtagagcttgttttagtgaagagttgcgaatttaggtattgaattcagtaatcaaaatatgccccacatcaatatcccaaattaactcctgtaattatttatacttctcaacactgctttaaaaagcacagaatcacattcttcaatataaaattaaaaatttcgaatttcatggaacgctttgaaatttttatggacttaaccctcaccttcaaaagccaaacttttgaagttatcagtgttcaaattttccttcttcaaaggccacggcccctctgctattacttatgctgtgtcttgttctcacagtccagtgtacgcttacttcttagaactttaatttgtactaaataaaaattgcactggattaaaacagtttacttcataaagctgttggcctcatcccaatgtgtaaacactgctaagctgtcttcctggcaagaaacccgtaaacaccatgaagtacatttagcaacgtcaattaacaagttctcctcatttttaaccaatgcatgcgtcatatttttaagtgggtatttgtcccgtgtgtttgcttgcagggtgactgtccactactgaggtcttgaactttgcaaatctcacttccaagtcaatcaattataacacattttatgaaacatagcacaatgtttaataaatggcaccattgatttgtaaaaattatttctcataggtgatacatttgcttacaggtacagatatttgtatcacagcatttattcaacatatttttctattgtagaatatatttaagtaaatgttaacatcaagttcatcctctgtcatctgtaatcaggtattttctgagaagtggaaaaaacaacagaatctgacaacggttgctggcagttttggggtcatcattctgtaaaacatgtgtttttgtcagtttatttttatcttgacattccccatgtcctgcagtcccaccctggggtgtgtactcagggaaactcactcataaaacccaggacactcaggcaagaatgctccggcaaacattgctccaaaaaacaaaatgtccggtgaaaacatacatcatatctgcccaaaaggacaaatacattgaggaatatgcaagcgatttactgcagtctgtctgttgttaaataaacaagagctatgcagagcattaggagcatagcggtatcattttacaatcaaaaacacaaaacaaactatccttttgtgttatatttaaaacgtaaaaatatacgtacatacacacacacaaatattaccagatgatagctatgatatcagagacacatatttacaaaaataacacagaaaagatccaaaattgtatgtgtgtggttttcatacattgagaagttctgggacagatgagagacaaagcatgagttgatactatttttatgaatatgctgttttttttcagtgtggatttcacagggctttttttcttgctataatcttactaattttttaataaaatgaattggcttttggggagaaccttcagcgttatatgcacatatgtttgtgttattcagagtttatatatgtatgtaaatatacacatagagagagtagagttttctggaagagaaagatagagatctgtgtcttgaactgtgagtcaagaaaggatttcagagaaaacatcaagaaccaggattttcacgctcgcttctgtgttaataatgcaaaatcagtttttcttggtgttaacttcttgaagcataggagaaaaattgaagaacttgaaaattgttcttaatttgcaagtaattaatttgcaactttgaaaatgacaggataaacatttcagttttactgtacaaccgttttacaacactgacagtgcatctattttaatttggcggagaaccttgcatcacagaaatcaaatcatgcatagttctcaaaaaaggcaataagatattaagatacaattctacacttttgcacatagaaaaattaaatttgaaatatagacattatggattggtcggtgctagggttcaagtcaagcctttgttaggggctctgttgaaccaagaataccgtctgcaagtttcctgtgtcacccactatgtttagggtgagagctggtcatcttcctgtgtggggcaccctctaaactctgcaaactgaaactggaaccatggttaccacatcctgttcattttccaatttagctcaacccctgtgtcctgcccaatagaagtggcaccatggcccccaaactcatcaccgtcctgtgtctgggtaagtcctggaagggaaaggaggacacggttgggatggaaaatgctctcttgaagacctggcctctccacaacccaggtctggtggtgggaagccaggttcatccaccctctgaatccaggctgagctgacaaacccagttacaaggagggaaggattcacatgaagacaagctatttttctctcctctcttttttttttttttgcctaggattctgcctgaaccagaagatctgcccacatgcgggtgagtcctatcccagtcctaggatgctgtgttggccaaacacaaatgattctccaggcagggagggtggacacgaagtcaggctgatgcagatgacatggggtgggctttgcagtgagcactgggaacacaggaagggagtcctctggagaccccaggctccattttgttctagaaaccctccataggcagcccctcaggctcatccaatctcctgaaggagcctgtgatgctcagaatccagcgtgtctgggggtgggtagggtaggagtactctctgtcaggaggcagggacccgtgctgggcacttgtgttgggaattgttaaatgagttgatatgttttttgtattgcttgaatctggtagattcctccttctcctccatgtacagatttctgttgtagacaagaactaggagcaacttggctcaatattgtatcatcatgcttagtagaattctgttctggggagaccttccatgtccactctggggtggctgtgtccctggcttgcgaccaggtatcccagggcatcaggggaccccacgttacagggcaaaccagaacaatgtaaagaaggaaatgcccccaaggacagcgggagacggggggctccacatttccctctctaggctgtgcctccttctcttccaggtgctcaggacaagttctccctgtcagcctggccgagccctgtggttcccctaggaggacgtgtgactctctcctgtcattcccatcttcgatttgtcatatggacaatattccaaacaactgggacccgaagccatgagttgcacactggcctttccaacaacatcaccatcagccctgtgaccccagaacacgcagggacctacagatgtgttggaatttacaagcacgcctcaaagtggtcagctgagagcaactccctgaagatcatcgtcacaggtaggagaagtccagcccaccccacgtccaaccggtgtccagatggacctgcccagagtccacacccaatgaagccagagagttgttgtgggattcctagtcatgcactaaccgtggacacagaagccatcctgggaatttaaagagagggcatttcctgtgaggaatcaggtacccaggtggaggaggagggaggaagccgagcagcaggagaatctgcctggggagtagcagacgcagggtgctggtaccaattgcagcagggtggatccagggaggagccatgttgcctgaccccagctggatccagggaggagccatgttgcctgaccccagcaccagtgtttccctcggggaagtcgttactctgcctcgaaggagccagaggcttggggaagtgacagttccctcgggagatgagtccagtggctcagtgggacatggattgggaaatgcacccattcctctcctcctccttcccagtctcgtgacactcatcccttctctctcatggatgtgcagagtgtctcacggagagttagaaactcatcctgtggagtcgcccctgcccatcctataaagcagggaagggagagtgtggagttattcatattttatatatgtatgtaaatatacacataaagagagagagagagtagagttttctggaagagaaagatagagatctgtgccttgaaccgtgagtcaaggaaggatttcagagaaaacatcaagaaccaggattttcacggttggttctgtgttaataatgcaaaatcagtttttgttgttaacttcttgaagcatgggagaaaaatttaagaactagaaaatagttctcaatttgcaagtcattaatttgtaactttgaaaatgacagaataaacatttcagttttgctgtacaaccattttacaacattgacaatgcatgtattttaatttggcagtctcacattcaaggagctcagaagaaacagagaagagattgggtctttccaccaagagagcggggaaagcaggttggggtgaggcagggagatccaggctacgaaagctcctggaggatctgaatggagattgggactgtgaggggctgcccaggaaaggagtttaccgtgtccttctgcctaaacagggaaaaggagtcatttccaccctccccaacaagtagtcacgtctaacctcttgggttttggggcaaaaccagttgttccttcagtgtgagcctgtgagatttcttctgatcctccagagagtcttgtatttttcaacacgcagagttgaaaaacagtgaggctcataacctcacagtcccatgccagggaacctaagtccagcagtgtgttttctgaaggttctcaaagcacagagtaattcccattttccgggagaaccccacatctcatatggtttcaagccagacaatggggatccgcgcagagagaacatgcacgcacacaaacaggaaggacgcagacgggctttgggggtgatgagggacagcttcaccctgaggtctcaggcgaggggtgaggaaggagactcatgtgaactcctctgtctctgctctcaggcttgttcacaaaaccctccatctcagcgcacccaagctccctggtgcatgcaggagccagggtgagcctgcgctgtcactcagaactggcctttgatgaatttatcttatacaaagaggggcacatacagcattcccagcagcttgaccaggggatggaggctgggatccattacgtcgaggctgtcttttccatgggtcctgtaacgcctgcccatgcaggagcctacagatgctgtggttgtttcagtcactcccgctatgagtggtcggctcccagtgaccccctggacattgtgatcacaggtgagtgtggctggaccatccgtggtctgttggtgccatgggagcttcatgtaatgcggttgttaatcaaacctcagtagaggaagagaaataaaggaagagagggactgtgaaaaagtgctcagcaaaggggtttaacatgtcttactgcttaaagaggcaggaggggtcacttctaccctccccaacaagtagtcacgtctaactccttgggcttgggggtacagccagttgttccctgcagtgggatcctgtgaggttccttctgatcctcccgagattcttatatttttcaacaaacacaattgaaaaatagtaagactcataaccccgtagccccatgtcagagaactcaaggccagcactatgttttctgaagggtctcaaagcacagagtaattcccattttccaggagaaccccacatctcatatggcttctaggggcggtaaaccacagggactcagtcaaaagcagaatcaaagaaatgcagaggaagtaaaaagacacagacataggctgactcaggaccctagagatgaacatgagattgacaggggcaccagccgacattcggaatctgctgccaagataagaacagcgaggctgggcgctgtggcttacgcctgtaatcccagcactttgggaggctgacgtgggcggatcacaaggtcaggagttcgagaccagcctgaccaacatggtgaaaccctgtctctactaaaaatacaaaaattagctgggcatggtggtccgtgcctctaatcccagctactcaggaggctaaggcaggagaatcacttgaacccgggatgctgaggttgcagtgagccgagatcgtgctactgcactccagcctaggagacaagagtgaaaatctgtctcaaaggaaaaaaaaaaaaaaaaaaaaagagggagagagattactttgttcatacactcaggcgtgtgttctaaaatcagcctctttttctcctaggaaaatacaaaaagccttctctctccacccaggtggaccccatgatgaggctgggagagaagttgaccctcttctgcagctctgaaatctcatttgaccagtaccatctgttcagacacggggttgctcatggacagtggctcagtggagggcagagacacagggaagcattccaggccaacttttctgtgggccgtgcaacgccagtccctggcgggacctatagatgctatggttccttcaatgactctccctataagcccccagtgacccgctgcaactttacaccacaggtgaggagcccatgcctgctgcatgctctggtgcccactggatcacagagccacacgtgaggggcgtcccgctgggcacacaggggtattaggtactctggataaaatgaaacagtgacaaacacacacaggaaaaaagaagctgagcatgatggggctgtcagggtgtagggtggtaagacggggcagctccacaccctctgccaccttctgtatgaagaaagaggtcaggacaaacacagggggaggtgaggccagatgtagtttgtcgaggtcagaggttgcccctcacccttttccatttctccaaagcccctcctgacccctcaacacagagagatctccctgctggggaacgtggagatttatcatcccgatgggagacaatgtctgttgacatcacccaccatgcttctccttatcaccttcccatcccagggaaggaattgtcccccagagattccaaggaagagaccccagggcccccattagtctttaggtggatgacagagtagggggtgtgcagggaccaagcctccaaagaaaatggtgctaatgctcgggaggctgaggcaggagaatcgcttgaacccaggaggtggaggttgcagcgagacaagatggcaccactgcactccagcctgggcgacagagcaagactccaactcaaaaaaaaaaaaaaaaaagaaagaaagaaagaaagaaagaaaaagaaagaaagaaagaaagaaagaaagaaaagaaaatggtcctactttaatggggcaatcaatgacgcttgctcaccccttctctgcctttttttttcctaggaaacactaagagtactcctctgtcattcacagaatccacccctgaatctggtaagcaaataactcttatcctagtgtctgagtccctggggagacagaaggccccagtgtgagtgaaagctgtgccacctcccagctccatgaccctgggctaggcagcccctcccaggtccccacattccccatccacatctgagactgtggtcagtgcgggaatctgtaaggcctttcagcctcagacgctttgggactgaggcctcatccacaggggaggaagaggtcagagtcacctgacccttgctgaaaagcaatgcttctcattcctccagggaggtctgtgaacatgaaaatgctggaagatgggaaggatttaaaagaccatattcgatattcactgtctgtctttttttgttgttttttttttttgagacagagtctcactctgtcacccaggctggagtgcggtggcacaatctcagctcactgcaacctctgcctcctgggttcaagcgattttcctgcctcagcctcccgagtagctgggattacaggtgcccaccaccacacccggctaatttttgtatttttagtagagtcagggtttcgccatgttgcccaggctggtgtcaaactcctgacctcaagtgatctgtccgccttggcctcccaaagtgctgggattacaggtgtgagccaccgcacccagccttattgtccatcttctaatgtcctatgacatattcaacagttcctgtgttccagtggtgtgtgcagggaggagaaaagttataatgaataaacgtgtgaactgatttattcagatccattaattttgtattcattaagatagagtcatgtgacagagaaagcttaagtggatcctttagagcaggtggaagggaagactctatgtcactcaaggaactgacatttaaggtgtgatcctgatgacaaggacagccagtgttggaaggattgatggaaggacgttcccagcaggtaaacagtggtgccataaactcaacatggcagggctgggcgcagggctcacaactgtaatcccagcactttgggaggctgaggcgggcagatcacaaggtcaagagatcgagctgttcctggtcaacatggtaaaaccctgtctctactaaaaatacaaaaattagctgggcgtagtggtgcatgtctgtggtcccagctactccagaggctgaggcaggagaattgtttgaacccgggaggcggaagttgcagtgagccgagattatgccactgcactccagcttgggcgacaggacgagactccgtctcaaaaaaaaaaaaaaattcaacatggcaatgccttgtgtgtgttcacagcaccagtgaggctgacatgccgggggagaggggtggagctgagagaggaggacagggaccaacttgtgtgaacgtttctcgtttttaaaatgtttaatttttgtgggtacctagtaggtgtgtatatttatcaggcgcatgagatgttttgatacaggcatgaaatgtgaaataagcacatcatggaggttaaggcatccatcccctcaagcatttattctttgagttacaaacaatttaattaagattttttttttttttttgagatggagtcttgctctgtcacccagactggagtgcattggcgcgctttccgctcactgcaacctctgtctcctgggttcaagcagttctcctgcctcagcctcccaagtagctgggattacaggtgtacgccaccatgcctggctaactttttgtattttagtagagacagggtttcaacatgttgtccaggctggtctcaaacacctgagctcaggtgatctgcccgcctcagtctcccaaagtcttaggagtacaggtgtgagccaccatgcctggccccaattatgctttttattttaaaatgtacagtaaagttcttattgactagagccagcctgttggtgctaccaagtgagggtttctaagcaacagtaaagagtttggattttattccaataaagaggtgaagacaagttttgttttgtttttttttcagagtcttactctgtctccaggctggagtgcagtggcgtgatctcggctcactgcaacctctgcctcccgggttcaagtgattctcctgccttagcctcctgagtagctgggattataggcacccaccaccatacccgactaatttttgtatttttagtagagaccaggtttcaccatgttggccaggatggtctcgatctcttgaccttgtgatccgcctgccttggcctcccaaagtgctgggattacaggtgtgagccactgtgcccagccgtttttttttttctttttttttgagacagagtcttgctctgttgcccaggctgaagtgcaatggcgtgatcttggctcactgcaacctccgcctcctgggttcaagcgattctcctgcctcagcctcctgagtagctgggattacagggggcccgccaccaagcctggctaatttttgtatttttagtagagacagggtttcaccatgttggccaggctggtcttgaactcctgacttcaggtgatccacccaccttgacctcccaaagtgctgggattacacgcatgagccactgtgcctggccgaagacaaaggttttagtcagaaacgtgtcatgatccacattctattttagagatagcaatcggccgatgtgaatagtgtttattacagggaggcaggagtggaagccaggagcctggtggggctgtgacatccttgtagaggacactcatggcagcttagatgtgctggggctggagaaggagttgagcaggtggattcaggagaggctcagagctggagtcactaagagggagagtttggaaacttgttccagtatttctcagtgcatgacctggggcacgctcatttctctctgagcctctgattccattgatggcaactcatacttgggctatcagagaagtagcaactcagcagggagccttatgggggaacgagacatagtccttgaaagagaaaagattataatcagacacttgggctcaatggatggctctgctagttatggtcactcatcttggaaagcatccgttttcttttcttttcttttttcttttgttttcttctttttgtttgagccagagtctctctgtgttgcccaggctggagtgcagtggtatgaaactggcttactgcaatgtcccagtttcaagtgattctcctgcctcagcctcccaagtagctgggattacaggtgtctgccaccacgcccggctaatttttgtatttttagtagagacaggtttcactatgttggtcaggctggttttgaactcctgaactccagtgatcagcctgtctgtgcctcccaaagtgctgggattacaggcatgagccatggcacctggccaaagcatccaagttgttggatagaatattgggctaatgatgcctccctccttatggaaaaaaaaaaagtaggaaagagaagaaagaaaagcttcccaagttgaatgtctagaagtagcagacatgtctagaattgagcccaagagtacggctggctacagtcttttctctttcaaggactatatcatggatgagagagtgatgagatgtgtccacacatgtggaagtcctcccaccacctctcagcatgggtcctggtacggagggtatgctcctatgtgacatagcctgtgccccctcccctttttctctcctgaatcctccacccacctgctcttactcattactcagaaaaacaccaacattgtttggagcaagttcaattctcagaaactggcatgagagtcatcctctggccacctctatctccattctcagaaagtgtatttgtcctgggctgagaagggacgagggaaatggtattcagctatggtacatgcagagggtttcctttgtcatgcaaaaacaaactgtcttgtctcatgaggaagtgggaggggaggcacactggagcctggtaggcctgggttcagacctccatgtctctccttttttttttcttttttttttttttttgagatggagtcttgctctgtcacccaccctgtgtacaatctcggcttactacaacctctgcctcctgggttcaagcgattgtcctgcctcagccttctgagtagctgggatcacaggcgtgtaccactacgcctggctaatttttgtgtttttagtggagacggagttttgccatgtaggccaggctggtctctaactcctgacctcaggtgatctgcccacctctgcctcccaaagtgctgggattacaggtgtgaaccaccacaccaggcctctgcatctctcttactggccatttgatttggacacgtgtcttcacttctcttggaattttttgtgtaagtgatggaaaatggagaaagtaactgttcgggtgtagggatcttggaagagcttcagataaagcatgttgtgtgttcagtatgtattggcacaaaacaggcaaccagtcaatgagagggtttatcatttgcttcttgacagacacacctcgccctcaaggacagtccagcaacctgcatatgctcactggactctcagtagccatcatctccattggcgtttgcctctctgcttttattggtttctggtgttacataaaatatcgtaagtctcagggaggggaggacagtatcatgtgagccccgtggggatgtgactggcgcacgggggtgctattcacgtcctgtgggttgatctgtgtttccgctgaggttcttttttttttttgagatggagtctcgctctgtcacccaggctggagtgcagtggcgctatctcggctcactgcaagctctgcctcccgggctcacgccattcttccacctcagcctcccgattagctgggactacaggtgcccaccaccatgcccggctaattttttgtatttttagtagagatgga[144 bp omitted]cttcactgaccaatcaccccaacccctcccctacctccacctcacctctggggaggccactgacctgcaggagatggtccatgagagaggcagaaggatgggggccatctatcggagcggtcctggggcagtcaagattgccccaaggttgctgatgggtggttctctgaatttagtgggggaggctggatcacgctgcagcctcaggcacgcccttgccttgttttggtcttggtattgccacctctgaagtgaagatctggaagactttctttttcaccccacagacaccaccatggcaaacacagagcccacggaaggccaacggacggatgaagaggtgagttctcccagccgaaaccatcaccacagcttcatcccctcccattcccagtgcccctgccttcagccactaaatatgctcctcttttcaccttcatcctctcaggagcctgcagcagaagagacacaggagatcatatatgcccagttaaaccaccaggccctctcacagacaggattccctcctgcctcccagtgtccccactacctctcggaggatcctagtatctacatcactgtccaccaagcccaggctgaggccagagctgcccccagtctttggcacaaagggcattaatacgcaaggacctggatctattcctaggaggattttttttccacggacattcttcctccttctggtaccatcttgacacctcgaagctggcaacagcagtgtctgaatgcttgtgggattatcttaaaattccagcactgctgaacagacaactagccattctacaattctattttgagcatccaaccatttaaggtgatttgactctacccacacactcatcctggatatctcattaatatcatctgagttatcctgaaactctacagacatgcttctggaaagccgatgtatatgctcagccagtttaatctctaaattactcaataaggtttttttaaaaaaatttttttaaagttctggggtacatgctcaggatgtgcaggtttgttacgtaggtaaacgtgtgccatggtggtttgctgcacctatcaaaccgtcacctaggtattaagcccagcaggcattagctctcttccctaatgctctccataccccctgccctcctctgacaggccccagtgaatgtgttcccctccctgtgtccatgtgttctcattgttcagctcccacttataagtgaaaacatgcggtgtctggttttctgttcctgcattagtttgctgaggataatgtcttctagcttcattcatgtctctgcaaatgatatgatctcattcctttttatgactgcgtagtattccgtggtgtatatgtacaactttatttttatccagtctatcattgatgggcatttgggttgattccacgtctttgctgttactcaacaaaattttgcagagatgaagtgtattctatatctgagtcatctaatatggtagccactagccaaatatggctttttaacttagaattagaatagatcaaattccatgaagtttaaaattcagttcctcagccacatggccacaatttgagttctcagagccacgtgtggctgctggctgtgggagagaatagcatgaacacaaaatgttttccttgtcagaggaagttctagctgttctagattaaaggtgcaaatttgaagatgcagagcctattttctcatgcagtgcaggctcctggaagagacctaatgtaacaaaacgataatatttcacatcaatggtgacatgtctttatcttacgaaatgcggggaacaagcagagttctcttgtggagtgtcttatcacctcttatcctcatgcaaatttctgccatagagattttctcccaaactttgagaaggtcacctctgtcaggcctctgagcccaagctaagccatcctatcccctgtgacctgcacgtacacatccagatggcctgaagcaactgaagattcacaaaagaagtgaaaatagccttaactgatgacattccaccactgtgacttgttcccgccccactaactgataccatatattctgccccgcccaagaaggtactttgtaatattcctcgcccccttaccccccaccgccctgcccccgctcgcccgccttaagaaggtactttgtaatattctcccccacaactttagaaggtactttgtaatattctccccaactttagaaggtactttgtaatattctcccccacaactttagaaggtactttgtaatattctcccctccccttaagaaggtactttgtaatattctcccccacaactttagaaggtactttgtaatattctcccctccccttaagaaggtacttcgaggc[142 bp omitted]atggtggcgggtgcctgtagtcccagccacttgggagtc[175 bp omitted]aagaaggtactttgtaatatcctccccccaacgccagccccctccacgaccttaagaaggtactttgtaatattctccgcgcccttgagaatgtactttgtacgcccatctcaaacctataagaacttatgataatcccaccaccctttgctgactctcttttcagactcagcccacctgcacccaggtgaaataaacagccttgttgctcacacaaagcctgtttggtggtctcttcacacagacgctcatgacaacctcctatttgtaccttttctcgtcccctggtttcacatggagagaaagcacacatccattctccgcacagaacatgctctggaagctgctttctgatgacgtcttcctctgagcctttattctgtttctttctacttgaattggcacctacccagagcaattcacaaactgctgcctgcaacgagctgtcactggctcatggaattgtcacatgctgtttcttcacctggtaattatctcccttttttgagcatctcagtgcagacatccaccttcatacacatgtctttatctcataggctaagtgaggaggttgattgactcacagtgtctgtgcccaataggctgagtttttatggcctgatccccactggtctttcatgtgtggactgtgagttttttttgttgttgtcgttgccaggctggagtgcagtggtgtgacctcagctcactgcaatctctgcctcccaggttcaagagattctcttgcctcagcctcccgagtagctgggactacaggtgcgtgccaccacgcaccgctaatttttgcatttttaggagagacggggttccaccatgttggccaggatgggactatgagatttttgaggcaggactgagtctgattaacctctgggactcaatgcaaccctccaaggatcctgcccataggaggaggtatcagcaactcaggtctggtaagtgatgaggacacccaacccttccagggagcagagcgtggagcaaacatcagagatcctctgatgttacccagaagtagtttctctgtctccctgggccaaagggaggatcatgcttcctctacagtctgggatatgtgagctaagagacaaatgctggttagtggatgtgagggtgaatggcaggcacactcccagcctggctatttgcatgacggccctacccttactattgtatattctacagctaggttggtcctgcagcaatctcgttttgataagcagggtaaaagtgaaagaccaaaacgtgtcttctctctgagcctctgcacacagggtggttatgccgcagagtcaactgatgctaaagggaaactatgcaagccagaaatgattttaattttgcttccacaccatcctctcaaaaataacagaaagtgagcattttttttttttctggagtctctctctgtcacccaggctggagtacagtgacatgagctcagctcactgcagcctccacctcccgggttcaagcgattctcctgcctcagcctctggagtaactgagattacaggcacccaccaccacacctggctactttttgtatttttagtagagacagggtt[133 bp omitted]accaatgataaatgtgacctgataagataattcaagtattccatgttcctacacttcatagttaagtgtagcttcaacatttatctggtggaaaaatgaatcaaccaactttccacacatgagtgttttactcttcattttcctttctatcaagaaacattatgtgccctgagaaattataaatttcataattatttgggacgaaaattgtttgcactttttttgtggggcggggggatggagtttcgctcttgtcacccaggctggagtgcaatggtgcgatctcagctcactgcaaactccacctcctgggttcaagtgattctcctgcctcagtctcctgagtctatgggattactcatatgtaatcccatatatgagtgatatgggtgcgtatcagtatgcccagctaatttttgtatttttagtagatatggg[147 bp omitted]ccttcatactttcttttgattttatttttactgtatttacttttagtttttgaatacttcaaattcttgacaatcatttgacaggtttaaatttgagataaccaaaaagttaatagttctctcaaaactctcacgttgtactcttatttacttattttactttaagttctgggatatatgtgcagaacgtgcaggtttgttacataggtatacatgtgccatggtggtttgctgcacctatcaacctgttatctaggtttaagccccgcattaggtatttgtcctaatgttctccctccccttcccctacccccagacaggccctggtgtgtgttgttcccttccctgtgtccatgtgttctcattgttcaactcccactgatgagtgagaacatgtggtgtttggttttctgtccctgt[137 bp omitted]cctccaccccctgggttcaggcaattctcctgcgtcagcctcctgagtatctgggattacaggcacctgccaccacacccggctaatttttgtattttttttttagtagagacggggtttcaccatgttggccaggctggtcttgaacacctgaccttatgatccacccgcctcggcctcccgaaatgctgggattccaggcgtgagccaccgagcccggcccagtcttaacattttttaaggcttagtcacctgcatgataccaaccaggctggtctcaactgtggggcaactggggttgttgaaccacgtgaactgcaggtgctccctgcagaacccttgcatagccggcgtctttatacctgtctgtccatccagggatggcggggttggtgtttgtcctccagtcgagggcactgacaaccttggggcagcagcaccaatcagcttccatcccatcacgtaagagccacacgtggagatctgggtgcacacgcatctcacgtgtttcccggaacagcctcagcgcctttccccgagcagccccttggacattcacctggcagaggagtctctggttctgtttctggactgtggacgcgggctagggcgcatgctgcaggtgaatcacttctgaggacagatgagtctcctgttctgcttcgggtcaccacgctgctctgtgatccagggagtctctgtcagcgtctcttctgctggatccagtctggagtgtcagggattcagagcacgacagaggtgaccatgggcaacgtgcacccgagcacttccctgccacagggacatgcagagcatttcccaccctgaggagcggccactcaagaccatcaggtcgcaggtggaggactgtgatgcagccgagctcctatcaccaccaggacttgtctcactgagcagaagccggtaacacaccagggaagacggccttgcccacggggtggctgttgacggaatctttctgttctgcgttctctcatcatggatgtgggtccctttgatgcctctgtcttcgctcagggccccaggaagattcattccccctagactctctgcttcctgggaaatgattacattctgagctttggcgaattcccgcagcaccgctccttggctccctcactgctacctggacaggcagaaacattaacatccccggccagcacctaggccccgaagtgaggggatacatgagccgtgtgcaggcttccagtccctggaatgtgtgtagggggttcactgtccaccacagcttaaacacaaaatgaacattttgactggaaaagggtagatagaaagaaaaagacctaaatgtggagcgtagtctggagccttctatggggcagaacagcactcgtgtgcaataatgctgcagtgagccacagcctcgcctctcagctgcacaggacagatgtgcagtggaacgggaagtcagaatgaccatccctgcggccgttatgaggagctgttccctaggtctctacaatgaaagctcctgaaaacagtcaatgtagatttgcacgctgagaacagcacctccattcccagctacccagagccaggtcctaattcttgcttatccaccaactcagtaaatataagtcacgaaggttgcttttattttatgttgaactttttgtagtttactagcttgcattattttttttaaaaaagaaa[223 bp omitted]gaggcagaagaatggcgtgaacctggaaggcagagcttgcagtgagccgagatcacgccactgcactccagcctgggtgacagagcgagactccgtctcaaaaaaaaaaaaaaaaaaaaaaaaaaaaaaaaatatatatatatatataaaatcatgatttctccatttttttcctttcccattctctgacttagaatatttgagcaacaaaaccataatttccggtgcaagaatgacgaagttcctaatttgagtctgcttagatacctgagcttagtctcaggcccaccatgcgctgtgaactcatcccaggttacatgatgtgcctcttggcaactctgagtgatgctaagtttcagggaagtgtgcacagatctaggacttcagtaatgtttaatca[138 bp omitted]gcctcagcctcccgagtagctgggactacaggcgcccgccaccacgcccggctaattttttgtatttttttagtagagatggggtttcaccgtgttagccaagatggtctcaatctcctgacctcatgatccgcccgcctcggcctcccaaagtgctgggatcacaggcgtgagccaccagatttgggaacattttgtaatggcagtgtgtcctcaaataccttgcttacagtgagttatatttttagaaattacagtgcccattacacacacacagctgttccttctctgtactcacgggaaacccacagagacccctccacaaacacctccgtatctgcatgaaagtgtaaaaccacatgaaagccgagcttgctatttactagttgtgcatagggttgtttgtgtgcatgtgtgtgtgtgtgtgtgtcttctagatacagtcaggttcaacggcattatgctaaatacttgccgctctaatgaataatcatcctcttggggtttctccaggtcatttgaatatggagacccacttctccagtatctctcctaagaataacctttcaacaggttcttaacatcgtcagcaaaaatattttcaacaaatgttcccaaaagcaccttagactctgaagacctaaaaaagatataatacattctttcagagctgttggggagatcctcagcaaacctacattataccataaacggtctcaaaaatagctcattttcccataagccatgagagataatgagatgggaagtccggaggagggtctgaggtgtctgtgaggagccgcctcctccagtttcaggtcattgttccctccatgtgtgtctaggaagccctccctcctgacccccaaggaccctgcgtggactgaccctccagtgcagctctgatgtcggctaccacagattcgctgtgtactaggagggggcacgtgacttcctccagcgccctggccagcagcccgaggctgggctctcccaggccaacttccccctgggccctgtgagccgctcccaagggggccaatacagatgctacgtatggtgcacacaacctctcctccgagtgctcggcccccagggaccccctggacatcctgatcgcaggttggagcccagtgggttcagacaagttccaaaattctgtgcagagctgcgtgtgcgtttgtaggggtgtttctgtgtgtgcttgtgtgtgtgtgtttgtatgtgtttgggtgtgtatatgtatgcatgtttgtatttttgtgtctgtgtatatttgtgtgtttttgtctgtacgtgtttgaatttgtgtgtttttgtttctctctctgtagttgcatttgcatgcatctgtgtgtatgtggggaggtgtgtgtgtgtgtgtaggtgtgtgtgtgtgagtttgagtgtgtttctgtgtgggtttatttgtatgtgtatgagtgtgtgtgagtatatgtatgtgtgtgtgtgttgtgtgtgcgtgtgtgtatgtgagtgtgtgagattgtatgtgtgtgcatgttgtgtgtgtctgagattgtgtgtgcgtgtgtgcatgtgagattgtatgagtgtttgcatggtgtgtgtgcgtgtgtgtgtgagattgtgtgtgagtgcgcatgtgtgtatgtgagtgtgtgagattgtatgtgtgtgcatgttgtgtgtgtgtatgtgagtgtgtgtgagattgtatgagtgtgcgtgtgtgtgtgcatgcatgtgtgtagacggcatagcacagatggtcacgaggtgcgcctggttcttccgccatgtcaccgtgttgttggggaaacgctgagttgagggctctccgacagccaggagcagcatctgagattctgtaaaaccctgcccacccgctctctgcacagggccaggcagcctgggctgtggcagggccaagactcttggatacacccccagactgcctggaaaaatgatgtccactggcgggaagagacagacaaggctgactccgcctcatcctgggtgctagtgacgtagcgccctgcagctttagccttttaaaggacattctggtcctgtggaggacgggacggccctacgcaggaccacggaccctctgctgtcccctcaccgcagacctgcaccctgtccctcagagtcaggacgtgggtgggcgggcatctctcagtagagcctgagctgcggacgtggacacagcagagtcaggagcatcatcaaactgacgaccagaatgagtgaccgaggcaaaagtctcaatcaatggaggattattattgttattgttattattattattattattagagacggagttttgctgttgttgcccaggctggagtgtaacagcacgatctcagctcactgcaacctccgcctcccgggttcaagcgattctcctgcctcagcctcccgggtagctgggattacaggcatgcgccaccacgcccggctaattttgtattttagtagaaacggggtttc[131 bp omitted]aaggcacagccgggaaaaacgcaagccacagacacatctgtgtctcctttttccaaagaggctctccgaagatttattctttactcatttccttaaagaaagacaggcacagaggccgaggggcaggtaggtggtgaggtgaatggttccagttactgcccagtaaatctaccttttacctaagataaggtgcatgcttgaagagaaaaggggagtaaaggaaaaatcaattacgcagacgtctctgggtaggtggaagaatggctgatctcatcttgtctttgctctgtgcctgggaagataagcttgtaacggacattatcagtgtggaataaaacagacctgagttttagctagacttagattgcagacctggaggccagcaaggaatttccttatgaatgatgtgtgagggcctcggtggatgcccggagcctcttcccgtgggggatctggctgatgccaaatgccagcaaccgctgtccaactggaagagggtgccgctgactcagcctccaggctgacctccccttttacattaggaatttgggagtcctgaggttttgttctatttttcctttacaaaatgtttggccggatgcagtggctcacgcctgtaatctcagcactttgggaggtcaaggcgggtggatcacgtgagatcaggagttcaagaccagcctggccaacatggcaaaaccccatccctactaaaaatacaaaaattagttaggtgcggtggctcatgcctgtaatcccagcactttgggaggtgaggcgggcggatcacctggggtcaggagttcaagaccagcctggccaacatagtgaaaccctgtccctactaaaaatacaaaaatcagtcaggcacggtggctcacgcctgtatgcccagcactttgggaggctgaggagggaggatcacctgaggtcaggagttcaagaccagcctggccaacaaggtgaaaccccatctctactaaaaatacaaaaattagctgggcctgttggcaggcacttgtaatcccagctactcgggaggctgaggcaggagaatcgcttgaacctgagaggtgggggttgcagtgacccgagattgtgccaatgcactccagcctgggtagcggaacaagagtctgtctcagataaaaaacaaaacaaaaaacaaaacaaaacaaaaaaacccaaaacgttatgcgcacccattatcccgaatcttcttagcggatcctcacggcacaccttagaggtggggagcaacccagcttttaaagttgagatcattgagcctccacccaccgaggttggactcccagactcagcgttctgtgaagggttgtggttacgattccagcgctgccatgcacctggctccaaagcctgcacggccacagctgcaacgttcccctgccctggccatgtttatagacagcgctccaggtgaagagcgcctatagccagggcagaacccctatcggggcagaggcactgtcgctccatcagagttcaccagcagcagcaccatggacgcactctcattgctgaagtccagccgtgttcgtgggcagacgcttctcagcttgtgtgagccctgggcttcctgaggtggttgttttggagcatttcgtccagcttctcccttgttcctggggaatggtttgccccatgccccagctctgtcgttccggaagtttctacttcacacagttaaaaaaaaattctctaaatatataaacaccatgacccaatttttctggcaaaaacaaacaagcaaacacacccacaaacatctttccagacacgtaagcaaaatctgcaattacacgctcttcacgtgtttaggcactataaccttcttcatttccggcaggtccttggtcctgtgtttctctagggggtgtctttccagcagcctctccttatgatgtcctgggattcctgtatccacttctctttcaataaccttgtaactcagcttgggaatcagagtggtcactttaatgtctaacatgcattttttttttaatttttgaaaaggtttaatcacaagttaaagagtcgcttagtcaaatacataattatattgtagatccatccatcccctcctggcagataatttagctcaactaaattgtaccaataaatccatctacaggtctcatggaacttagctggaaaacaggaaaaaccatggaatccgacaatgtcaaatatggcagactttgtgaatcgactcattgacttatctatctgcctacctatttacctgtattcctatggatctgttcatcagttaatctctctatctgaaggagccacagggaatgccaacagccacccagagctggaaagggcaagggagggttctccccaagagcctccagagagaacgctggccctggccctgccatcaccttgatttttagcttcgcaactctgagagaataaatttatgttgtcttaagccacccaataataatttgttatgacagcctagaaaactaattgctcatctcccccaacccccatcccctctctctctgaattcatacttatgtagtgtatgtgtgtttctatacacacatgtgccatgaattttgtttgtttgtttgagagacagaaggaactgagttttgagtcatagctaaagtgtggtttcagataaaacaccaccagctggtatttgcatgccctattctcttctagaaatgccgaagtttctagttaactggttttatttgtcaggagaagtaagggaattgcaaatattcagcctactaacattaggtggaggacacatttcctttttattctgcaaagaggatcatgatggtaacaatatttatgtattagtttgacaagagaacattgcattaggagatatacctaatgttaaacgacgagttagtgggtgcagcacaccaacatggcacatgtatacatatgtaacaaacctgcacgttgtgcacatgtaccctaaaacttaaagtatgtattacaaaaaagcgcctcctaattattccttggcctatttcttcttggtgttttaaatttaattatactctagtaatttatatttaagctaagaagtagtctactggtgttgaaaacagatgtatatagagagattcttttttgatctataagataattttgtaaactatttttatagccagaattttcatatattggtctttactaatcctgtcgaattccaatggtgtaggtaattttttggtgcagctgcagaagaagactttgcaagaaatttgcttgactttagcaagtacaagtggactaaattgcttcttttgtcctggaaagttcagaactatttgggcatttctgattctcagattcttccatccacacatttcatcctatgcgacaaggttttacatacctcccaagaaacttattttgacatagaaatattcaactattttgtgctataactcaagttatcttgctgctggtgaaaagatgtgggtgcaaaaatattttgaatttattatgctacaaataatatgtgatattaatgcacttataaattaatttgttagagtaactttgtatattgtaaatagaataccactcagaaaatgctacacaacacattaaacaaacagcatgatttagtacaaatgaatctgggaatagtctttcaaatgaatcacaatcaagaatcctacattgagtacaacacactgcttttaactggtgcttcatattctttttgtttccaatgaagttgaatacatttggttgtcttaattaaaagcttaagtgtattttgttctaacttatatttaatggattaattttagttaattgattttatgaagacacttgaaaggtgaactgaagtgtgtggtgcagatataaagctagttaagtcattggaaacattaacttggcttttattgttatttctcagcctggaattctctgaagcatctgataatattgaccctctgaactgcttgatcattactctttttttttttttttgaggcggagtctcgctttgtcagagtgcagtggtgtgatctcagctcactgcaacctccacctcccaggttcaagcagttctctgcctcagcctcctgagtagctgggattacagggacctgccaccatgcctggctaatttttgtatttttagcagagatggggtttcactgtcttggccag[132 bp omitted]gatggtctatattattatacatttttcatttttcttctatttctatctcaagatttcttcgggaagcttgccgttaatgttcttttttttaaaaaaaaacatatgctccacctttgagacagtattgccgattgaacttcactttactaagaaattcttcaccaaaagctcatctataaaactgcccagtgggagtttagcactttttctgatttatgaacattgccaactcggtagtgccaagagatttcaaaattttcaccctagaataccaaggtcaggacatctctcctacttgcaggaaagatgagctgaactggacctgatctagccttgaacagagatatgcatgagaatctagagggttttccctgagaccatggaccagcaacttctcccttactgcctctcactttgtatggggatcctcagactgtaacaatgaattcagcactgggtcttggatagttccaccctgggatgcccagatctaaatttagccaattggcctgtgaatgtgacataaaatacggtatttatggctgggcacagtggctcacgcctgtgatctcagcactttgagaagctgaggcgggtggatcacttgaggtcaggagtttgagaccagcctggccaacatggccaaacctgatctctactaaaaatacaaaatttagctgggcatggtgacatgcgcctgtagtcccagctacttgggaggctgaggcaggagaaaggcatgaacccgggaggcggagcttgcagtgagccaagatcgcactattgcactcattacagcctgggtggcagagcaagaatctgtcaaaaacaaaacaaaacaaaacaaaacaaaacaaaacaaaaaacaagtcttttacaagttcgaagctatttcttatggagttgttatttgtaaaaccatgactgtaacccacctgacttggatcaaagagaaacggaatcaatcccaaggcgtcccctcaatagggcactgggcagctgtggatgtcatggggaagttctcctgacggatgaccctccaggacacatagctatgtggggagttagaaaagaaaaagacaacactcaggacattattagtcattagctttctttgagaaagagccagagagaactagtatattgctatgcttttctgtgtgtgtgtttgtattttacattttaaaaatgaaagaatacatgaaaacctttaaaactgggtacactcagctacttgggaggctgaggcagaagaatggcttaaacccaggaggcggaggttgcattgagctgagatcgtgccattgcactccagcctgggtgacagagcgagactccgtttcaacaaaaataaaaacaaaatcaaaacgacaacaaaaaccacaacaaaaccctaggtacttgtgacggagggagaaaacagcagaggagatgggatgaagctagactaacctcattgtgctttgtttgttgtttcagtttggaaatagacatatattttcttgaataggtgtagtgccaaaatattttcacatacgatttatgaacctaaagacaaaacctaagtaaaaagagtaatgaaactaatcttaacaccaaattaagattttactaaacaaaggtgaattatttccactgaattttaagcaaaattatttaactatgttttataagtaatacatattatacatcattttatattatagatttttaatgttttaaaataatcaaatatgatatataatatattgatttataattattactgtaataaagaattttgacgattgcatatacctcattttatattataattttttaaaatttttaaataatcaaataatatatatgattattataataaataattttgacgatgtatagtaaatacatatatcatcgaaaatatttaatcttaaaatatacttagatagtgaaatgttttttatttctgtttgaggaaataggtgagtccacattaagacagaatgcatgaaatgaactcagaaccccttattatacaagagaacaaaggagtcacaattaccttcaaattcatttgacttaaacagaaaggcaatcatgaaggatcccactgacaaagaatggaatatttatagcatcaaataatatttcaatggattgaaataaatgaatatatataaaccatatatgtttactagtgctaaaacaaaagaaaataagccaaacaaacaaaatacctcatttacagcaccaaattaccacattccaaaagtggaaatggacgcaagaaccagtatctcccttttctatctgaagtattccacaggaaacattcttttctctgtagaagatttctgcagaaaatttcagaccatttttagtctgaataatctgcataatctgaataatctacagattattctgtgggaataattcatctttgtttagtgaaaccttaacttggtataagattagtttattttttacctaggttttgtctttgggtttatgaattatatgtgaattttttttttttttttttttttttttttttttttgggacggagtctcactctgtcccccagactggagtgcaatggcgccatctcggctcactgcaacctctgcctcccgggttcccgccattctcctgcctcagcctcccgagaagctggaactacaggcgcctgccac[131 bp omitted]caccgcgcccggccgaaaatatttttgcactgcacgtatattcatgaaaatatgtgtatacttccaaagtgaaacaggacatagtttccaaactggaagatggacagagttgcaaaatctgtacactgagtgtacaagcaataaacatcaatggcctcccaaacccttagacttcaggttcgtggtgaatgtagtactggatggatcctgttgatgacaaagccatgggggcaggaatgcaagctggagaatgcaagacgcaaacaaatgagtcacttactgtgtcagatctaattttttaaaaaaacttttgtgttatcttgccctcagattcatattttcaaaatctttaatttttgtttaaaaaattaccgctaaaaccaaggcaggaggagtggaattccaagacggtggattacgtgattctgttcctcatagccccacagaaacatcagctgtgaccgccatccaggaccagaaatatttctgtgacaacctagaagtgcagtgagagttgccagcaccacaacgagcaaaaaattgcagaataagatacaagaaatagttacaaaattaggtaatagtatagcagaatgctataatcaagctttattcactagccctgtttcacttttttattactcaaaacgtctagactcattggagacagggagagttatgttgatctgcaatatattcccagtgtcttgcatttatttttatttttttattttttctttttttattttattattattatactttaagttttagggtacttgtgcacaacgtgcaggtttgtttttgaaatggcataaagcaatatatttgaaaattaaaaaaaagatttttgaagaaaagagaaagaacagcttttctcttctttctgcatctcttcttccccagggaggcacagttcagtgccaggagagactccgcgggctgcgagctctcccacagaggaaagtgaaagcagagggaacacccaggttcctcagcctcaggggaaactgcccacgtcagcctctcagcaccagatcgtcgaggggactggaatggcggaatagtcttggaggaggcgggagcaccggaagctgtgagcgctcacagcagccatcacgcagatctaacaaaatggctgcagatctgacccacagactcatgggagccgaatagacatctttccaaagacacaggaatggacggcaggtttagaaaaaggctccacatacctaatcatgaggaaaacgcattaaaatcacagtgaggcatcacctctctggttaggatgataacaaaggcaaacgaaggtaagtgcttcgaagggcgtgaagaaaaaggaaccctggaataccattaataaaaatgcagattggtgcagccattttgaaaaacgcatagagattcctcaaaaaattaaaatggaactacacgacacagcatttctctgctggatacttcgccagagcaattgaaatcaaaatactgaggaggtgttgcacgcctatatttattgcaccattattcacagtagccaagatacgaaaacaacataaatgttcatcgatggatgaatggatagagaaaatgtgatatatacctatcataaaatattattcagcatttttttaagcattaacaaatttacttaattatttgaggcaaggtcttgctctgtctcctagactggagcccagtggtgtgatcacagctcactgcagcctcaacctcccaagctcagtcaatccttccacctcagcctcttgggtagctgggactacaggcgtgcaccaccacgcctggctaaccttctgtatccttggtagagatgggggtctcgctgtgttgcccaggctggtcttgaactccttgcctcaggtgatccctccgcctcagcctcccaaactgctgggatcacaggcgtgagccactgtgcctggccaaggggtacaacgttttaattctccaagatgaataaattatcgatatctaatgtatagaatgaaaactattggtaagagtactgtactatacgcttgaaatttgctaaaatagtagattctaagtagttttaccacacacacaagtgaggtgatggattgtggtgattatttcactatatatataaagtcgtcaaggtatacatctttaatatgtgccttaaaaatactcaaagtggaaaaacaaaatgagtctgttatttaggtgagacctacgagcactgcctcctgagctcagtgatggacaaacctgtgatatattaagggtcactatctcttctactatttttactatttttcaatattaaaaagcacccctttttactattacagttatataattagcagcacatggaaattgttcagaaacaagatcgcaaccctgaaattcaccatattttaatttttaatttgttgttgttgttgagatggagtttctctcttgttgccctggctggagtgcaatggtgcaatgtcggctcactgcaacttccaccttctgggttcaagtgattctcttgcctcagctttctgagtagctgggcttacagacatgtgtcaccatgcccggctaattttgaatttttagtagagacggagtttcaccatgtcggtcaggctggtcttgaactcctgacctcaggtgatccgcccaccatggcctcccaaagtgatgggattacaggcatgagccacagtgcctcacccatttctaaaatataatatatctctagtaaatccaactaagaattgaaaaaaaatgtttaaacatgaatgtatattttggcaatcaaaatattacctttgtaacatttggacacaattctgtttcatagttgcttaataaactgctacatagaatacaacagatatttattaatatttatgagttgtgcaaatacatacaacactgggtaaaaaataatttgtaaattcttctttgtagaggcagtattgtatttgcaattttgatgaaaaaatggcttaagaaaatgtatgtaattgtaca[131 bp omitted]ttctcctgcctc[225 bp omitted]gacctgacaaaatgcaataaaccactatactgcgtgaagtgagtcaatatcttaaataatttgaccaacaaaatatgtgtgcatcaacaatgtattttacaaccaaatactaacattcccaaatgtcctgtactggtcaaaaaaaaaaaaagacacagaaagaaaattaattataatattaaaaatagttttatctaatattttaaaattacagataaaaattggttatagtaaaccaaagaaaaaaacagtctacaaaataatgtgaagtatttgataggtagatatgtaaagaaatagatgcagatcagagatagaaattttgtttgatctttgaattccaaagattagagaccaggagaattataggtataaaaaaattaagaacttagtatttgagtaaaagttaattccaaaatgagttggaagaatatttgttaaatacatggatttaaatattttgacatttagtttaaaaactaaaaccagtttctactggatgccatttaggcaaataaaaatatttatgtaaaggcatataaccatataaattaatatctagtagattaagcatatagaaacaggtatatatattttaaaacatgagttgaggcaaatacttagtaagcaattttaaaacatgagccatagaacaattaaaaatattacaatatttcaaatagtaaaacttatttaagactaacgacatataatatggaactcagaatattagaaatattttatatatcaaaattgaaaaaaggaggctgtcattaatattttaagtgctcattctaaacagtaaaataaaatatcatttgttatctaagtagggaaattatgtaaacaaggatttctgtgggtaagaaaaaaagcctcacaaatatatgtttttctcggagattatcaaccaaatgcaaaataaaatttaaaaaagatttctttaaatttgaaatccatttttttgttacatgtttaatttatggtcatagcgtcactgtacataattactattcttcttttttttttttttttgatggcgtcttgctctgtcacccaggctggagtgcagtggcacaatcttggctcactgcaacctctgcctcctgggtttaagcgaatctcctgcctcagcctcatgagtagctgggattacaggtacccaccatcatgcttggctaatttttgcatttttgtagagaaggggttttaccatgttggccaggctggtcttgaattcctgacctcagatgattaacccgccttggcctcccaaagtgctgggattacaagcatgagctaccgtgcctggcccataattactattcttcttgcagctatggatttttatatctgggtgaaaattaaatgaagagtaatggtttctcagtttgaaatgaatgaatgtgagatgcgagtgaaaccttatatgatactatgaagtagaagatagagtattttagccatatttaacttgacatactattttataatacctaaaaatgtagatgcattgcaaaaacattaggacttaccaaaacaagaacagcatttttataataattttttaactggtttaataattaaaacgttgttaagctacaatgggatttaactgtcattaaaatttggaaaatactagaatcttggtaaagtgtagattagtttagagaaatagatgctttagaaaatcaaaaccgtttctggaaggctatataataatgataacagtttggtcccagtggacagggagaaaagtaggagagtgagaaataaaaccatgcattttatgtagcatatacacacaaacttattcaaaattttcttggaaagaaaatgtcttgtgacaagtatgagaaatttagcaaatttatagtagacattggtcagcaaatccaaacaagagaaagaaaggagctatgcacgaatcataaaggaaacatacaactaaatttaaattccactaaacttagttgagcagcagtgagaacaacaaaatgatggaaaatcatggacacaagaaaatatctgtgagtcctagaccagctgggactatgggtctcatctgctctttaagaatggcagtcattcgtggggaaatgaaaacctctgtttcatctcttatcaaagtgatttgcagagaggcacaatagtaggctaaatgaggcacatcttacttcctgagatcctggcaggaaaatccccaccccacggctcttctggctgggatcttagctgtcagaacagactaagtgctcactgttttaagactgagtggagtgacagctttagaacgcttgatctttaaattccaacggatctggaccaggtgcaaaggtttggggtgtagcacagcacttttaaagctggctaagagtcagagatgcatttatacctgaacacatttatagtccctgattatccctgctccctaagccttgaaaacagtcactcactttaaaaggtgagattctatttggtgaagtgagagatagagtttaccttctttacactggttccaggattttctacggacatgaaattattgttgcagttaagtgcatggtaatccccagaacccatgggaaagagatggaggtgtatggctttgcacttatgacagaaagtttccggagacatatgccattgccaaccaaagcacaacacgcaaccaccacaggtaattttaaatctcctaagttgcaggtgtcattagacaggaagtgtgtaagcaggtggcaagagctgacacactcttaaccctcatacaagcagcagagtgaagactgtgaggcttggcgtgttcattcagagacagtgtttcggatggggctatgacagaagaggaaaataagagatgccaggcaactcttgagcgggaaggctggggcaattctatgtctcaggaaccctcagaaaatattattactttaagggtttttttttaatggtccatgctgatgctaggactaaacaataattttgtgtacacaccaagttttttatgataaacactctaattccctgagaatatggctctgtatcaaagaaaattcctcttaccaaatgccatttcttgctgaagaagtagccttcatggtcacagtctgggcacctgtgcaaaaggggacatcttatccctgatataaaggtttgggacaccatgaggtcatcttcttgctgacaggtaattattatatcatctgtgagtacactgacagtatttgcatggggatttgagatgctctcagaaaaacatttttgaaatgttcaaatgactgagagctaatagtagtgattagatccattcaactgagaaaaagagagcaagagacagaaacagagatagaaagagatagagagaaagagagacagaaaaaagataaagacagtatgacagaaacagagagagagagagaaagagaaaggaaggaaggaaggaagaaaaagaaagaaagagaaagaaagaaaaagagaaagaaagaaagaaagaaagaaagaaagaaagaaagaaagaaagaaagaaagaaagaaacatctctgaaattcttggagaaaccacatggaaataagatatcagatgaggaccctgatgtctaagaactgagatgaaggaggaggcaatgagtctggatgtgtttcttcccaaccttggggtcttgcctcctgaatgttattctttttctattctgagaactttgtacaaaaggctgcctggaagggagaagaaaagaatcaagttggaacaaattgtctctgtgatagaaatgaacttggcaggagtggagaaacttttattccctgtttccataggcacatgtgaagtatctgatctgtgtcaaacatggtgtatgagatgtctcagaataaaggacatgaaaacttccaaagagcctgcctgtattaagtcaatattgtagtcaagaaaagtggacattacacacaataaataatagatagagtatgcattgtgttaaaagataataagtgcattgtgagaaggaaaagaagtaatgtgctccacagaatagtaaaaaattttgcaagcaggttgtttggctgactggagctgaaactcttccccaagtcttcaggctgtttgtcctgcagattttggactcaccaagtgccaacaattacatgaacccattcctagatagcaagataagtagatatagatatgcacatatgtacatatatcggttctgtttctctggagaacacttacaaatacataatttgatcataggaatgattctagatgaactgaatcttaatatgttttgtctactgtttctgaggtttatggaactggctgtctgattagatttaaagacattaagacagtatgacagaaacagaaagagaaagaaagagaaaggaagaaaggaaggaaggaagaaggaaggaaggaagtctgtgatagtccgtggcatgatgtggcattaggggtacaccactagatgctcctaatcctacacttataaggaacgagaatctgggtggccttgcatacacctttgaagattgttgtcaaactattaagtatagtatgtgtggctgttttgtcattggataaagaggtaaagaaaaagatgagcccagagattagaatttccagttcaagcaccactacataaatatctgaggtttctatgtgtgccctgaaagagactcttatcatctgtagctgtaggggtgagattgctgaaaatcaaaccgagaatctcatccttgaagtggctgtattacaattcaagcggagtccccagcctcacagggtatctactgttcaagtaatgccattggtcaggaatgggtgagatcttgaaagatggaatgaggatgtatattaagaccctgatacagctgaggatatcaagcccctaactttgaatgagtcttctttgccaatagaagcatcctctctatctgcaagggaggagattaaccctgtactgtctgaggaaacaatactggcctcccctgaggcagttgccatgcaaggctatgctgattctccttaggatacatcctgaccaaccctctttgcttctagacctataactagattcaagtctcgcaggccctgaaaagtgtgttacaaagtgtggctcatgagaagttgtgctacactccaaagtaatttatttatttttctaatttatccatacagaagtctgaggaacacgtgtcagagtggatattaagggtttaggataatggtgaaaagaacataaagttgagtcggaccgaatttatatatataagctcactaaacagagattgcacatttaatgttgcatcttggagaaccggaaatgattctaccagtttgtctggttgattggctgaaacatggagcaaaagctggcctgcagtaaataaactcaaaatgccagacatgccttggtttgctgcagaggaattaacttaaaggcttaggaagactgtaatgttaccatgcatgtatcaaacctagtaacccacattggaagcatcagaagatgtatctttcaacaatattgcaaagggagctctggcatccttgaggagctctgtgatttctcttctctggaagctggaacctacagtggaactgctgaattttaaaaaatctaaatgtaatgggagtaatttggcccctacctcttggcccccagagagacaggggccaagtagaggaactcagccaccaaaggcaaggtgggtttggttaccatgatggacagcaaagtcaaaccagcgatcggaatagtcccgcagacttatggtgttggctagttgatcacggcattctaacaagggagatagataggaaacctactaaattctcacttgatctgtataagcagaaaatttctatgtcaagtgaacaaaagtcaacccaaatcataaaagcagagagccacagtctctcaatcaatggctagcactgagtcagttcatagagccagaatcccctgaattaaagggatcccaggcagggttcccgtgagggcactgtccctggtacactaccaagaatatatactcttaatctttctcctggactttggttaaagggacctgcagccttttacaatggcaatggagccttggggaaaataatcagataatttgggcattactggaaatggggtatgaactgacattaattccaggagacccgaaacgtcactgtggccctccagtcagagtagtggctgctagaggcaaggtgattggtggagtttgagctcacgtgttccatagtgaatccagtgtatccctaaacccaccctgtggctgtatccccagttccagagggcaacattggaatagacatattcaacaactatcacaacccccacagtggttccctcacttgttgagtgagggttattagagtgggcccagtgggagccactagaactgcctcttcccagctaaactgtaaaccaaaagcagtcttgcattcctggaggaattccatatattgggacttgaagcgtgcagagacagtgattcccacaaccttgccattcacctctcctattttacctccacagaagacgcagggatcttggataatgatattagattattgtaagcttaatcagatccaattgaagatgttgtaacagatgtggttttgtagtttgagcaaattaatacatcccctgatacccagtattcagccattgatgtgttaaatatttttttctccatcactgttaataagaaccatcaggaacagtttcctttcatttggcaagggcatcagtacaccttcacagtcctacctcagggtctgggaaagcacctgggggttgtgatcggggtctcagtggccttcagctggtgctcttcctcctcttctttctcctctgacactggcctcagggccaacacaggacattgggtgagtaggaagttggcggggagacccatgggctgactgaaggtggggtcagggcaccaccaaccagacagattccagatgggaaagttcagctcagaaaaacggctccagcatttcccagtgagaaaacctagaaagaagagaataaatgtgaacatacatgaacataccttattcttttggttgtttcatctaacgacgtttttaaaacatctatgcaagtgtgttttcagctttccttcttttctcttgagttctctgtgcagggcaggtggctctcatgatcccaaggctgaagctctgtccctcttcacccagcccagagggaggctgatttccaaagtcctgtggggactgtggagtcagagaacgacagaggcctgtggaggaggtaattctgcccgaagaccccagacgcccacctacccccacaacctcctcactggccctcacactcccatgtccttccccgggtccagcccagctgctgatgtccaggaagaaaacttctgtgacaggaagaggggggcacctgagggtggagacagaagccccaaagtttcggtagcaatgatagcaggggaaaaggctgagaagggcttgggactcttttatataatatataaattaatataaaaattaattcaccttcacaatgtctgtctaatgcatttcaacaactgtctgtgttttcctcatgtatcttggttgtcattcctgtggggcggctcctcccacgcacctgacctttcataaagggtttctcccacggctgtccaggcatcagcctgatgaaggggattgttgccgctgctcctccccactcccccaaactcagtgtcagctcaagattgtgcccagcagggatgggaccaacgccagtctcacactcacctgtggggcagagcagacgcccatgtcagaccaccgtggattgaatctgtttctcacacacaggggaggggctgagcactgaccatggcctccagtgagtgagcagagaccccccagcgcctgtccacacacacaggggagggggagccacagcttccagcgtcacccagagccctgacccctccctgcctgggaggacgtggggttcctcttctgtcccacacggaggtgggagcctcctcctccctaatgaccctgggtggtcccagacacctgtggccactcagcattgaactctgctcatggaaggggatgcgtctcaatgtgaggaactgttcttcctctttctgtgcccgtggctgtgatgatctgcatatttcagatgtatcacaaggagaatttcatggtatttggagccgatgtgggctcttgagtgggggcgtcaatcatcctcctggactgtggagcccagcaccaggatcctctcccgtccccaccctcctgtctgaactggtctggaaattcaccatggctgagcctcccatgtcctgggcaccactgacccccacagccactgtgatgagtggggttcacgacagcaggctcagaggtgacattcatgtccaaagtcacataaaccctggatgataatcaggaattaaatacaaatcagctcaccttccccagaatcagattacagacctaacaaattcttctgaaaactctgaacatggacggaggtgccgagggaaggccaaggacgcaagggacactgagggggcgggaccgactcagagcctcattcccggggtgggggtgggtgatgttgcaacaaagagaaaaggggaagtacaggagagggacggtttggtaggaaggaaacacacactctcaagacagaacaaatatgttttattatagttaatccctgcatttccccttttgagacagggtctcactctgtcactgaggctggaatgctaaggggtgatcatagctccctgcagcctccgcctcccaggccgaagtattcctcccacctcagcctcctgagtagctgggactagagatgtgagctgccatgcctggctaattttttgctttttttatacagacaaggtcttgctatgtggcccagggtaatctgaagctcctggcctctagccttcacccacctcagcctcctgaagtgctgggattccaggcatgagccaccatggtagaccctgcattactcctctgtgctcactgccacacgcagctcaacctgagctacacagccaggtgtcaggtgcgtctctgctgatctgagtctaactgcagcatggacctgggttttccctgaagcatctccagggctggagggacgaccgccatggtaaggaccccgcaacgctgagctgatggacgggctgaaggagggagggagaccccatggggaagctctgagaaggaagaggaagcctctgctcaccctcatctggaagggcagacgcaggagggcaccagttctatttgctgctacatcccaggtctcaaggagatgaggataaaccagacagacagtggctggggggcaggaaagaccccattacagtctgaaatgtctgcagagggcctggtgcctgcccccacctcagccctaaaggtatgacagccaggctcctgagagggcagttgcacttcctgtgtggttgcacataacaaaaccccatgacaagaaggatccagcctccgagtgtccacaccctgtgcgtctctctgtcctgccagcactgagggctcatccatccgcagagcagggcagtgggaggagacgccatgacccccatcctcacggtcctgatctgtctcggtgagatttgaagagggaggggagcttctaacctaggagggacctcaccccacagccaaactctggtccctaaggagaccccaggggctcacaaagatcccagggaggggaggacctgcccaggcttcaggggaaaaatccctcacagggaactctcttccagggctgagtctgggccccaggacccacgtgcaggcaggtgagtctgttcccagctgtcccaggtccctcctcctcactagggacaaggggccacccccgtgcagctggggatggggaatagcagttctgggctgactgatgggggtgtctggagggtcctgcagctgagagctgagatctgttgggtgggaaatgacttagaatccgacctctgatttccttccagggcacctccccaagcccaccctctgggctgagccaggctctgtgatcatccagggaagtcctgtgaccctcaggtgtcaggggagccttcaggctgaggagtaccatctatatagggaaaacaaatcagcatcctgggttagacggatacaagagcctgggaagaatggccagttccccatcccatccatcacctgggaacacgcagggcggtatcactgtcagtactacagccacaatcactcatcagagtacagtgaccccctggagctggtggtgacaggtgagaggacactcaggagtcccagccccaggctctgccctcaggaagggggtcggctctcaggggcatctccgctctcacagctcaaccctggggatgatgtgggaggtgggagccccatttaacacagtgcctccttctctcctaggagcctacagcaaacccaccctctcagctctgcccagccctgtggtgacctcaggagggaacgtgaccctccagtgtgtctcacaggtggcatttgacggcttcattctgtgtaaggaaggagaagatgaacacccacaacgcctgaactcccattcccatgcccgtgggtggtcctgggccatcttctccgtgggccccgtgagcccgagtcgcaggtggtcgtacaggtgctatgcttatgactcgaactctccctatgtgtggtctctacccagtgatctcctggagctcctggtcccaggtgagaaattcacagaattgcttggagttccctgagtctccctgagtctccaggcaggtggggagcagccgcgtctcagggcagctccaggtgggatgatgttggggcgagagggctcagggctcctggggccggagacacaggaagatcagcgggggagagggagggtttgtggggaagcctgagggtcggctcctggaaaccatgaacaccttttcccaggtgtttctaagaagccatcactctcagtgcagccaggtcctatggtggcccctggggagagcctgaccctccagtgtgtctctgatgtcggctacgacagatttgttctgtataaggagggagaacgtgacttcctccagcgccctggttggcagccccaggctgggctctcccaggccaacttcaccctgggccctgtgagcccctcccacgggggccagtacagatgctacagtgcacacaacctctcctccgagtggtcggcccccagtgaccccctggacatcctgatcacaggtgaggagcccagcgggttcagtcagggacccaggctctgcacaggccctgccaggggagcccaggtggtgatggccggaatgagggttgggggtcccaagggagggagagacagagagagacaggggatgggcggggaggggagactcagagaaaacagagacagagagactaagggtcccagggagaggcctggggaggtctcagctcagaacaaggtggggcagcccctcacccatccttcttctctctaggacagttctatgacagaccctctctctcggtgcagccggtccccacagtagccccaggaaagaacgtgaccctgctgtgtcagtcacgggggcagttccacactttccttctgaccaaggagggggcaggccatcccccactgcatctgagatcagagcaccaagctcagcagaaccaggctgaattccgcatgggtcctgtgacctcagcccacgtggggacctacagatgctacagctcactcagctccaacccctacctgctgtctctccccagtgaccccctggagctcgtggtctcaggtgagggccctgatcttgtcctctccgagctcaaaggctcagctcaggccctgcccccagcagagctctgggacaataatgaatgaggggagtgaagcgggagggtccacaggggagggtccagcccatgggagagtggaaataggcagggacctcccacccctggctcccacccctgaagtctcagtaaagagcatgaagggctgggaggagacgggggcgggggggcgggtggtgaacctcagagatgtgattagactgagggtggaagacggagaccccacccgctcccctcctgatgtctccacctcagaatcagagcctctgggggtcccaaaccctatgtcctgaccccatgggtgacaaaaccagccactcccagctcaagagaagtttctagactcatctcaatgctacctccaatattcagggtctgatttccagggcagcagcggggagggtggacagtaagggtgtggtctgcgtggcttcctggggcttcagggatggggcaggtgttccctccgtggtgttcagaggggagggaggtgtctgaggttcagcattgatgagcggagcagagggatctttccccctccctgagcaggattcccaggagccgtcacctctcatgggggagccagggtcaggggagatcacagtcaggtacttggtctaggagtcaggtgggaggagcccggggaggtggggctgggtctgtgatggctcagcctctccttgggaggtggaacttctgaaagagcccattccccttgcaccctggactcctcatctgaataagggggagctgcctggatgtgactgccccaaagccccttcatttctgaccttctggggcatctgggatgtggctcatcctagacctgctcccgtctacagccctctctggccctctcctaattctcccaataactgagacttgttaagagttaaaaaaccaacggagatgggggcaggtgcatgcagttttacccatccctcctggaatctcagcttagtaagacaaagacacaatattttggaaaaaacaaaagtttacaaaaccccgctggttgagagtctcccctctctcgtgtacaagagaaaatgtctccaattttctaccaaaatcaatagctggcacagctctgcaggacccccagcccctggccttgtcctgcaggatgtgtgatgagtagaggaaggagaacaggctgggtggggaggatttggggtccaggcctgacttggacactgggaagatgctggggctgatggaggaggaagagaggcaggtgagttggagagaggacagatggacagtgtattggcagctctcatttctcatttccaagagcccctgagtataagcccttcacccacacctgcggggtccctgggccatctcaagacaagagaggaggctgcttgggcctcggtgggatctgactgtgatgaggctggagtccaccccagatgtgctcctttagagagaagcaccccagctgtgggtgccgctcacactgcccctcctgtgctcacctggaggcctctgtgctcagggcatccctgagaataaggaggggccctgcacctgctccctggacaagtcaggcaagtattcacagcacgtctttctgtttaactcatttctactctgcattttctgtatgcacttgtcctttgttactttttttctaaaacttttaaaacagtatttgaatatatgaatttataatatatgaacttaaaattgtatgcatatattatttaaaaatccttatttatactcccctttaattgagtcttgatttaatttatacattcaatgtagaaacaaatttctcattaatatcaactcttcctccttcacacattaaaaatgaagattttcttaatgaatttaagacatgttttgaaattttactcctaagaatattgtatgctcattttaacttaaagaattattcaacatctttaacaattgataagtgaggtatttgatttctttatatatatatatatattttattattatagtttaagttccagggtacatgtgcacaatgtgcaggtttgttacgtaggtatacaggtgccatgttggtttgctgcacccatcaactcgtcattcacattagtatttctcctaatgctatccttctcccagccccccacccctagactggccccggtgtgtgatgttccccgccctgtgtccatgtgttctcattgttcaactcccattatgagtgagaacatgcggtgtttggttttctgttcttgtgacagtttgctgagtgatggtttccaggttcatcaatgtccctgcaaaggacatgaactcatcctttttaacggctgcatagtattccatggtgtatatgtgccacattttcttaatgcagtccactgatggacatttgggttggttccaagtctttgctattgtgattagtgccacagtaaacatatgtgtgcatgtgtctttgtcgtagaatggtttataaccctttgggtatatgcccagtaatgggattgctgggtcaaatggtagttctagttgtagattcttgaggaatcgtcacactgtcttccacaatggttgaactaatttacactcccaccaacagtgtaaaagcgttcctatttttccacatcctctccagcatctgtagtttcctgactttttaatgattgccattctaactggcatgagatggtatctcactgctgttttgatgtgcatttctctgatgaccagtgatgataagcatttttgcatatgtctgttgcctgcataaatgtcttctcttgagaagtgtctgttcatatcctttgcccactttttgattttttttttttgtaaatgtgtttaagttctttatagattctggatattagcactttgccaaatgggtagattgcaaaaattttctcccattctgtaggctgcctgttcactctcatgatagtttcttttgctgtgcagaagctctttaattagatcccatttgtctattttggcttttggtgccattgcttgtggtgttttagtcatgaagtccttgcccatgcctatgtcctgaatggtattgcctaggttttcttctagggtttttatggtgttaggtcttacatttaagtctttaatccatcttgacttaattatcgtatagggtgtaaggaagggatccagtttcagctttctacatgtggctagccagtttttctagcaccatttattaaatagggaattctttccccatttcttgtttttgtcaagtttgtcaaagatcagatggttgtagatgtgtggttttatttttgagggctctgttctgttccattggtctatgcatctgttttggtaccagtaccatgctgctttggttactgtagccttgaagggtagtttgaagtcaggtagcgtgatgcctccaactttgttctttttgcttaggattgtcttggcaatgcgggcttttttttggttccatatgaactttaaagtagttttttccaattatgtgaagaaagtcagtggtagcttgatggggatagcattgaatctataaatccctttgggcagtgtggccattttcacaatattgattcttcctatccatgagcatggaatgttcttccatttgtctgtgttctcttttaattcattgagcagtggtttgtagttctctttgaagaggtccttcacatcctttgttagttggattcctaggtattttattctctttgtagtaattgcaaatgggagttcactcatgacttggctctctgtttgtctattattggtttataggaatgcttgtaatttttgcacattgattttgtatcctgagactttgctgaagttgcttatcagcttaaggagattttgggctgagtcaatggggttttaaatatataatcatgtcatctgcaagcagagataatttgactttctcttttcctaattgaatacactttatttctttctcttgcgtgattgccctagccagaacttccaacactatgttgaataggagtggtgagagaggaaattcttgtcttgtgccggttttcttttcttttttttttttttttattatactctaagttttagggtacatgtgcacattgtgcaggttagttacatatgtatacatgtgccatgctggtgtgctgcacccactaatgtgtcatctagcattaggtatatctcccaatgctatccctcccccctcccccgaccccaccacagtccccagagtgtgatattccccttcctgtgtccatgtgatctcattgttcaattcccacctatgagtgagaatatgcggtgtttggttttttgttcttgcgatagtttactgagaatgatggtttccaatttcatccatgtccctacaaaggatatgaactcatcattttttatggctgcatagtattccatggtgtatatgtgccacattttcttaatccagtctatcattgttggacatttgggttggttccaagtctttgctattgtgaatagtgccgcaataaacatacgtgtgcatgtgtctttatagcagcatgatttatactcatttgggtatatacccagtaatgggatggctgggtcaaatggtatttctagttctagatccctgaggaatcgccacactgacttccacaatggttgaactagtttacagtcccaccaacagtgtaaaagtgttcctatttctccgcatcctctccagcacctgttgtttcctgactttttaatgattgccattctaactggtgtgagatgatatctcatagtggttttgatttgcatttctctgatggccagtgatgatgagcatttcttcatgtgttttttggctgcataaatgtcttcttttgagaagtgtctgttcatgtccttcgcccactttttgatggggttgtttgtttttttcttgtaaatttgtttgagttcattgtagattctggatattagccctttgtcagatgagtaggttgcgaaaattttctcccatgttgtaggttgcctgttcactctgatggtagtttcttttgctgtgcagaagctctttagtttaattagatcccatttgtcaattttgtcttttgttgccattgcttttggtgttttggacatgaagtccttgcccacgcctatgtcctgaatggtaatgcctaggttttcttctagggtttttatggttttaggtttaacgtttaaatctttattccatcttgaattgatttttgtataaggtgtaaggaagggatccagtttcagctttctacatatggctagccagttttcccagcaccatttattaaatagggaatcctttccccattgcttgtttttctcaggtttgtcaaagatcagatagttgtagatatgcggcattatttctgagggctctgttctgttccattgatctatatctctgttttggtaccagtaccatgctgttttggttactgtagccttgtagtatagtttgaagtcaggtagtgctacaaaccactgctcaaggaaataaaagaggacacaaacaaatggaagaacattccatgctcatgggtaagaagaatcaatatcgtgaaaatggccatactgcccaaggtaatttacagattcaatgccatccccatcaagctaccaatgactttcttcacagaattggaaaaaactactttaaagttcatatggaaccaaaaaagagcccgcattgtgccggttttcaaagggaatacttctttgcccattcagtatgatattggctgtgggtttgctataaatagctgttattattttgagatatgttccatcagtaccgagtttattgagagtttttagcatgaagggctgttgaattttgtcaaaggccctttctgcatctattaagataatcatgtggtttttgtcattggttctgtttatgtgatggattacatttagtgatttgcctatgttgaaccagccttgcatcccagggatgaagctgacttggtcatggtgggtaagctttttgatgtgctgctggatttggtttgccagtattttattgaggagttttgcatcaatgttcatcagggatattgacctaaaattatccttttttgttgtgtgtctacgaggctttggtatcaggatgatgctagcctcataaaatgagttagggaggattccctctttttccattgactggagtagtttcagagagagtggtaccagctcctctttgtacctctggtagaattcggctgcgaatccttctggtcctggattttttttggttggtaggctattaattattgccttcatttcagaacctgttattggtttattcatagattcaacttctttctggtttagtcttgggagggtgtatgtgtccaggaatttatccatttcttctagattttctagtttatttgtgtagaggtgtttacagtattctctgatggtagtttgtatttctgtggaatcggtggtgatatcccctttatcatttttcattgcatctatttgattcttctctcttttcttgtttattagtcttcctagcggtctatcaattttgttgatcttttcaaaaaaccagctccaggattcattgatttttttgaagggttttttgtgtctctatctccttcagttctgctctgatcttagttatgtcttgccttctgctagcttttgaatttgtttgctcttgcttctctagttcttttaattgtgatgttagggtgtcgattttagatctttcctgctttctcttttgggcatttagtgctataaatttccctctacacactgctttaaatgtgtcccagagattctgttatgttttgtctttgttctcattggttccaaagaacatctttatttctgccttcatttcattatttacccagtagtcattcaggaacaggttggtcagtttccatgtagttgtgtggttttgagtgagtttattaatcctgagttgtaatttgattgcactgtggtgtgagagacagtttgttgtgatttctgttcttttacatttgctgaggagtggtttactaccaattatgtggtcaattttggaataagtgcaaagtgatgctgagaagaatgtgtattctgttgatttggggtgtagagttcagtagatgtctattaggtctgcttggttcagacctgagttcaagtcctggatatccttgttaaccttatgtgtcattgatctaatattgacagaggggtgttaaagtctcctattattattgtgtgggagtctaagtctttttgtaggtctctaaggacttggtttttgaatctgggtgctcctgtattgggtgcatatatatttaggatagttaactcttcttgttgaattgatccctttaccataatgtagtggccttgtctcttttgatctttgttggtttaaagtctgtattatcagagactaggattgcaactcctgctttttttttttctttccatttgcttggtagatcttcctccatacctttattttgagcctatgtgtgtctctgcacatgagatgggtctcctgaatacagcacactgatgggtcttgattctttatccaatttgctggtctgtgtcttttaattggagcatttaacccatttacatttaaggttaatactgttatgtttgagtttgatcatgtcattatgatgttagctggttattttgtccattaattgatgcagtttcttcatagtgtcagtggtctttaccatttggcatgtttttgcagtggctggcactgattgttcctttccatgtttagtgcttccttcaggagctcttttaaggcaggcctggtggtgacaaaatctctcagcatttgcttggctgtaaaggattttatttctccttcactgatgaagcttagtttggcttgatatgacagtctgggttgaaaattattttctttaagaatgttgaatattggcctccactctcttctggcttgtagagtttctgccaagagatccgctgttagtctgatgggcttttctttttgggtaaccagacctttctctctggctgcccttaatattttttccttcatttcaaccttggtgaatctgataattatgtgtctttgggttgctcttctcaaggagtgtctttgtggtgttctctgtatttcctgaatttgaatgttggcttgcctttgtaggttagggaagttctcctggataatattctgaagagtgttttctaacttggttccattctcctcgtcactttccggtacactagtcaaacataaatttggtcttttcacatagtcccatatttcttggaggctttgttcatttcttttcattctcttttctctaatcttgtcttcttgctttatttcattaatttgatcttcagtcactgatatcctttcttccacttgatcgaatcagctattgaagcttgtgcatgcatcacgaagttcttgtgccgtggttttcagctgcatcaggtcatttaaggtcttctctacacggtttattgtagttagccattcatctaaccatttttcaaggtttttagcttccttgcaatgggttagaacatgcttctttagcttgaagaagtttgttattaccgaccttctgaaacctacttccatcaacttgtcaaactcattcttcatccagtcttgttctgttgccggtgaggagctgcgatcctttggaagagaagaggcactctgtttttggaattttcagcttttctgctctggtttctccccatctttgtggttttatctacctttggtctttgatgttggtgacctagggatggggttttggtgtggatgtcctttttgttgacattgatgctattcctttctgtttgttagttttccttctaagagtcagacccctcagcagcaggtctgttggtgtttgctggaggtccagtccagccagaccttatttgcctgggtatcaccagcagaggctgcagaacagcaaatattgctgcctgacccttcctttcgaagcttcatcccagaggggcacccacctgtttgaggtgtctgttggcccctactgggaggtgtttcccagtcaggctacacgggggtcagggacccacttgaggatgcagtctgtccgttgttggagctctaatgcggtgctgagagaaccactgctgtcttcagggctatcagacagggacgtttaagtctgcagaagctacctgctgccctttgttctactatgccctgcccccagaagtggaatctgtagaggcagtaggccttgctgagctgtggtgggctccacccagttcgtgcttccaggcatctttgtttacactgtgagctactccaacctcagcaatggtggatgcccttccctccatccagctgcagcatcgcaggtcgatctcagactgctgcgctagcagtgagcaaggctccgtgggtgtgagacctgccgagccaggcacgggagggtatctcctggtctgccagttgctaagactgtgggaatagtgcagtagttggtcaggagggtactgtttctccggatacagtctgtcacggcttcccttggctaggaaagggaaatcctccgaccccttgtgcttcccaggtgaggcgacaccccatcctgcttcagctcgccctttgtgggctgcagccacagtccaaccagtcccaatgagataaaccaggtacctcagttggaaatgcagaaatccagctgcagaccggagccattcctattcgaccatcttggaagcgacacctatattttttttaaagaaggataggtatccatgagaaagtgactggtttcattatgttctttttatttgttattcacccactagagaatggctcctttctaattactcttcaatgatctcctttaatttctggtacaattttagaaatcataatacatggaaattttatttctttatttctaaattacatgccaatatttctcaaatattaacgtgtatataactacataataaatacatttctgaagttttacatatatacacaggttctatacattacacatgatgtgagtggaggtatatctaaacacatttttatatgtattcatccatatgcttcacatatttgacatgacaggtctttacaggtttgttattggtcttcttatctagactcacacttgctggagcagaagtattcatttatgaacctcggatagcaccagcatttaacatatgcatatttgtgtgtgtgggtgggtgtgcatgcacgtgtattgcattctaggggttactgcctgtatgaggaattagttacctaaggattaaacggaagatgaaaccccaggtgaagtggttgagggcatgaaggggaggcagacccagactttcacccctttgtgttcctgacattcaagagcccctgaggtccaacccctcctccatggagcctgggtcctcagctggcggatccgtgaaactcatctctggggagcattggcttctgtggtcctgcacctgctccttgcagccagttagggctcagagaggacacagagagcacacaaggtcccaggctgcacagagagcacataaggtcctggttatttctgtattggggaccacttaccatatccatgctgagctcccgggatgcaggaaaactctcccaaatgactcaggagctgagtttggatttgtagaacacaggaagtctgaaataattcaatgaggagactggagggaaccctgctacagcagaggaagggtttattgaggaactccataaaactcatgtcaagagacacaggggaaaagaagaatgcagagcccaggagtgaggctgggctcagggctcttctccactgttttgattctcagaagcagctgagaccctcagcccatcacaaaacaagacagactccacgactagtgagtgaggagatgctctcagttatgggactggcacagagggtcaggtcctgtaaaggggaggtgggtgccctgggtggacatacaggagtcccggggtgattccgatctgccctgacctctgtgacctctttgtccagcatccctaggccaacacccccaggattacacagtggagaatctcatccgcatgggtgtggctggcttggtcctggtggtcctcgggattctgctatttgaggctcagcacagccagagaagcctacaagatgcagccgggaggtgaacagcagagaggacaatgcatccttcagcgtggtggagcctcagggacagatctgatgatcccaggaggctctggaggacaatctaggacctacattatctggactgtatgctggtcatttctagagacagcaatcaatatttgagtgtaaggaaactgtctggggtgattcctagaagatcattaaactgtggtacatttttttgtctatgaatgttgacttcccttgactggatcccctttttttcccatccccagacatgaggctccatcccacatggcaccgttgggtccacacctccacacacctgtgtgctctggtccacggcatgtgacacagtcttccttattcctcattgtcacactccttgatgtcacttactgagtccccgtctcttcagttcagagatccaaacctgaaccaccaactaaatcaacgacaggagatcagattccaaccaggaaaacataaatccaccctgctgccctgacaccctctctgtaccttatgagcccttccctctttctcagatgctatctgtgtaatttctcctgaaatatcaccacttggaatcatcacactggcatttcaagtgacaccacagctatgctgattcagaaaaagacatctctaaaatactgtaattagtggtatctaccaatttctgtgacataaatatttttctcatggcccaaatcaaggtgccaatgggttctcactgaatacagggttgggaagcaagggacagaactgtcttcactaatgagcaccagggacctgtggcacatcccactgagagctcacccatatacctacagtcctttctatttcagaggcaatgatcacttctacttcagtgttatggcacaggtcaaatgaaattctgacactgttatcctagcatatccacaaaagacaaacctattaatatc[140 bp omitted]ggtgaaaccccgtctctactaaatacacaaaaaaatattggccgggcgtggtggtgggcgcctgtagtcccagctactcaggaggctgaggcaggagaatggcgtgaacctgggaggcggagcttgcaatgggccgagattgcgacactgccctccagcctgggcgacagagcaagactccgtctcaaaaaaaaaaaaaaatccaagtacaacataagaaaaatgttaacagaactatgcagtttcgatgaaagaattttttttgagatggagttttgctttgttgcccaggctggagtgcaatggtgcaatctcggctcactgcaacctccacttcccaggttcaagcaattctcctgcctctgcctcccgagttactggactacaggtgtgcaccaccattcccggctattttttgtatttttagtagagacgggggtctcgccatgttagtgaggctggtcttgaactcctgacctcaggttatccacctgcctcagcctcccagagtgctgggattacaggtgtaagccactgtgcccggctgatggaagaattcttaaatgactcgttctactttctgctggtccaggcactccttggcttggggcagcatcccaccagtttctgcctccatcttctcaatgcttacacctacctggttgcctctgtcttcacacccattcttctgtgtgtgtcttttctcttcttcagattatgatatcactcagatcagattaggactcatcctaattcgttatgatcccttgatcataacttaaatgcatttgcaaagactctatttccaactatgttcacatttatagctaatggggctcaggatttcaacgtgtatattagggggaacaagtcaatttatgacagtgtctacaagaaaagtatgcatagaaatacatttaaccaaatacaaaaattaggtgggtgtggtggtacacgcctgtaatcccagctactcaggaggctgagacaggagaatcgcgtcaacccaggaaacagaggttgcagtgagctgagatcttgccattgcactccagcctgggcaacagagtgagactctgtctcaaaaaaagagaaatacatttaaccaaagagatgcaatacgtatacattgacaattttaaaatactgctcaaagaaataacaaaagacctaaatgaggaaaaagtcatcccagtatcataaatcaaaaggcttaaaattagttatctccctctagggaacctagactaatacactcaccccgtctccttgttcggaggctctcctgcctatcagcttttctcctctgtgctttccatgtccctgtggttctctggtgagccccatcatgctgtcctagaagatccacttagaatttcggtatttactcaccattttgactcctcttaacgagacaggcacatgccagctgtttccattcatccaacctgaacctgagcccccgatcattttttctaccacttttcagtcctgggaaactcagtcccaatgtgcttgtcattcatttgagaataattttcattttctccagtagttttaaaattactttgtatctattctagatatcgtttgctctatcatagttaagacattaatgttatttatgaatttgtgcacattaaactcatgatctttcatttctgtaaaaatgtcaactatttcctttgcaagtatttattgactaacatactccttatttccttcattctgaaagtgtgacacatagagatatatctgtttcctcttctcactctattctttgtgtgcattaattatcttttctatttttttcatttctagtttttctccgatgactaatgaaaaatttaataaatattctacaccaatacaatgtttatcatttcagcagtgtctggttcttgatgaaagtatttctaaatgtgttaatataatttactattttcacatcacaatagcttcctaattcatttctataattgcctgttttttctctaatggactcttcgatttttattcctctggggtgggtttttctcccacacacctgatcttccatacagggtttctcccagggatgactcaggaaggaaaactgatgaggggcatttttgtacccgctcctgccctgcggtgtccatgctcccaagtttagaatcagctctgtgttatgcctggcatggtggagcccatgagaccctcacattcaagtgccaaagatgcccggtccagcagtgataaagcgagactgtgtcatgcacacccgggaaggtggctcagtgctgaatgtggcctgggtcaccaaaccaagcaatcccagattctgtccacaaatacagaagagagggagccacagtctctctaggatcccacggtttcctccactttttcctttgttctgagagaaagacaaagtgccatgactgctctgtgggctggacagatgcctgttttcacctgcaggcttgaactcaagctgaggtcttgagcattcccaggtactgataaagcaccttagattgtttctagaaaacactgaaaaattaaccctttgttaattatgtagaaacaaaccctgccctgaaccaaactcctgaaacgctcaggttaaactttgtaactcaatcccttcactgcagatacccagtaggaaagtcacatgagcaaggatgagatgactttggttaaactcagaccccacagggccaggaaggcctgacggagaggaggctcgtgttgccaggtctcagataagaactgtttctaaggacttttttaaaaaccccataagaaactcttccatgtctttcacccctctcctgctttgacatggtttattactagatattctttaggacatcaggaatgcagataggctgctctcgagagaatacttgcccagcaatggcatctcctccaatggactgacagcaactctggctttgaacctctggaaccagggaactctgcttctaagcagctctgtcagcctctcccttgttgctgataagaatttcctttacctctctatgtacagagagctctctctatgatgtttttcctctactctcacaccacaacagtcatcaacacaggagacttgtaggatcagatgtgtgggattgtttcccagacccaatagcgaacagcagctgggtgtcctctaagtcggctccgagctgtctacccagacacagtcccagatcccacagattgaaggcccattctccaagattgcccccacacaccattcccaagtccagacctccagaacttctgactgactggcttcaagttggggatcccatgaccacctctttgggtttgattaatttgctgtagcagctcacagaactcagggagacactgacgtttactggttgaatacaaagcacactgcagaggacacagatgaagagactcataggaggaggcatgggggaagggaccggagcatctatgccctccctgggcgccacgctccaggaacctccgcatgctcagccatccagaagcccatgaaacccagtcctcttgggcttttaaggagcttcgtgacatcagcatttcctcccacaaggaacagggtgagaccatcttctgggagggtcttaagagccaccatcagaaaggcagggaacattcgagtcttgccttgggcaggtgaaggaagggcaggaggaggtcagaggcctcccctaaggcctaacacagccaatactctaacaaaagactgtaaccagtggtatggagttataagccaggaaccgcgggtgaaaaccagtgtgtatcacaacatcacacttccctctccggatgcactgtgtcttgccatgccatgcactccagattgtaatctttgcttctcattgtcaaatacaagcaaaatccaggcaaccctggagcaatgcagccttgaattcctggggtctcttgtatgcacactctcttcaaccaaacggggatcataactatggcatttgtgggatgcaaatcctgtgtatacgaatggcagactttccctatacatggtgcagtggagccagcttcagggctggagtacaggcaggttttgtgacatgtgggccacggactggagccagttcccttgtacaccaaagaacaactgtacttagagataattttctctagatttttgttttgttttgttattttaggttaaagcattggatagaacacccagtgtcaccttgtctacctccaggacatgctgcagggcccactctatggaagtccctctaacaaatgctctatgaacaccctggtgtttagtgcttctttctttggaatcccagcagctctatcactggacggtttggtgcactcctttgatggaattcctctgggctgcttggggtccactccagcctcaggtgtagctggaggacgcagcctcccaccttggtctggagccctgaggccctcactgtcattgcagatcccgaggttcctctcccacctccattcagtggtggaaaactccattctaattaccccttgaaggtcctgggaccctctggcctctgttctttcttgtggatccacctacacttgggaacttcctcacctctttttctgctcatgacattgatgctctgggtatttcagaaatgcctcatgtacatttctccattagggtcagatgtgagatccagagtggacacatcaatcatctacacagactggggggtccaacatcgagatcctttcacatcccaaacagttcaggtcttaccctggtctggaaatcaagcacaaatgagcccctccgaatgtcccaggcaccactgacccaacaaccactgtgaccagtgggattcatgacaacaatctgcaaaggaggaaactgaggctcagtgatgggacattacaaaccaaggtcatgtaggcagcggatgataaccagtcatcaaataaatatcaactccctcccccactccccaaatcaaagctcaaacataagtcattgttctcaaaacgttgaacagggattgaggtgcagagggatggccaagtaagcaaagggcaccgaggaggcaggaaagtctcagatgtttgttcccagcgggtgggagtggacactgtagcaaaatattttaaaaaggggaagttgagaggggactatttggttgaaagaaaacccacaatccagtgtcaagaaagaagtcaacttttcttcccctatttccctgcatttctcctctgtgctcactgccacacgcagctcaacctgagctacacagccagatgcgagatgcttctctgctgatctgagtctgcctgcagcatggaccttggtcttccctgaagcatctccagggctggagggacgactgccatggtaaggaccccacaacgctgagctgatggatggctgaaggagggagggtgaccatgtgggaggctgtgagaaggaaagggaagcctccgttaccctcatctggaagggcagacgcagaaagcaccagttctatttgctgctacatcccgtctctcagtgagaagaggagaaaccagacagacagtggctgggggtcaggaaagaccccattacagtctgaaatgtctgcagagggcctggttcctgcccccacctcagctctaaaagaatgagagtcaggctcctggtagggtagttctgcttcctgtgtggctgcagatgacaacaccccatgagaaggacccagcctccgagtgtccacactgggtgggaaggaggggaggctatttctctctgtgtgtctctgtcctgccagcaccgagggctcatccatccgcagagcagggcagtgggaggagacgctatgacccccatcgtcacagtcctgatctgtctcagtgagatttgaagagggaggggagcttctaacctaggagggacctcaccccacagccgacctctagtccctaaggagaccccaggggctcacaaagatcccagggaggggaggacctgcccaggcttcaggggcaaattcctcacagggaactctcttccagggctgagtctgggcccccggacccacgtgcaggcaggtgagtctgtccccagctctcccaggtccctcctcctcactggggacaaggggccacccccgtgcagctggggatggggaatagcagttctggactgactgatgggggcatctggagggtcctgggctgagagctgagatatgttgggtgggaaatgacttagaatctgaactctgatttccttccagggaccctccccaagcccacactctgggctgagccaggctctgtgatcacccaggggagtcccgtgaccctctggtgtcaggggatcctggagacccaggagtaccgtctgtatagagaaaagaaaacagcaccctggattacacggatcccacaggagattgtgaagaagggccagttccccatcccatccatcacctgggaacacacagggcggtatcgctgtttctacggtagccacactgcaggctggtcagagcccagtgaccccctggagctggtggtgacaggtgagctgacactgagggctcccagccccaggctctgccctcaggaagggagtcagttctcaggggcatctccctctcacagcccagccctggggatgaagtgggaggtgtgagccccatttaacatggtgcctccttctctcctaggagcctacatcaaacccaccctctcagctctacccagccctgtggtgacctcaggagggaacgtgaccctccattgtgtctcacaggtggcatttggcagcttcattctgtgtaaggaaggagaagatgaacacccacaatgcctgaactcacagccccgtacccatgggtggtcccgggccatcttctctgtgggccccgtgagcccgagtcgcaggtggtcgtacaggtgctatgcttatgactcgaactctccccatgtgtggtctctacccagtgatctcctggagctcctggtcctaggtgagaaattcacagcattgcctggagttccctgagtctccctgagtctccaggcaggtggggagcagccacgtctcagggcagctccaggtgggatgatgttggggcgagagggctcagggctcctggggccggagacacaggaagatcagcagtggtgaggccccgggggagagggaggatatgtggggaagcctgagggtcggctcctggaaaccatgagcaccttttcccaggtgtttctaagaagccatcactctcagtgcagccaggtcctatagtggcccctggggagagcctgaccctccagtgtgtttctgatgtcagctacgacagatttgttctgtataaggagggagaacgtgacttcctccagctccctggcccacagccccaggctgggctctcccaggccaacttcaccctgggccctgtgagccgctcctacgggggccagtacagatgctccggtgcatacaacctctcctccgagtggtcggcccccagcgaccccctggacatcctgatcgcaggtgaggagcccagcgggttcagtcagggacacaggctccgcacaggccctgccaggggagcccaggtggtgatggccggaatgaggggtgggggtcccaagggagggagagacagacagagacaggggatgggcggggcggggaagactcagagaaaacagagatagagactgagggtcccagatagaagcctggggaggcgtcagctcagaacaaggtggggcagcctctcacccatccttcttctctccaggacagttccgtggcagacccttcatctcggtgcatccgggccccacggtggcctcaggagagaacgtgaccctgctgtgtcagtcatgggggccgttccacactttccttctgaccaaggcgggagcagctgatgcccccctccgtctcagatcaatacacgaatatcctaagtaccaggctgaattccctatgagtcctgtgacctcagcccactcggggacctacaggtgctacggctcactcagctccaacccctacctgctgtctcaccccagtgactccctggagctcatggtctcaggtgagggccctgaccctgtcctctccgagctcaaaggatcagctcaggccctgccccccaggagagctctggacactaagaaaagaggggagttggctgggcacggtggcttacacctgtaatcccagcactttgggaggcccaggcgggtggatcaggaggccaggagatcgagaccatcctggctaacacagtgaaccccgtctccactaaaaaatagaaaaaattagccaagcgtggtggcaggtgtctgtagtcccaggtactcgggaggctgaggcaggagaatggcatgaacctgggaggcggagcttgccgtgagctgatgtcatgccactgcactcaatcctgggcaagacagcgagactccatctcaaaaaaaaaggaaaagaaaagagtggagtgaagggggaaggtctgcgggggagggtcgagcccatgggagggtggaaatagacggggcctcccacccctggctcccacccttgtagtctcagtagggtaaagagcagggaaggctgggaggagatgggggtgaacctcagaggagatgagagtagactgagggtgaaagacagaggccccacctgctcccctcctgatgtctccacctcagaatcagagcctctggggatcccaacctctaagtcctgaccccatgggtgacaaaaacccagtcactcccagctctaaagaagtttctagactcatctcaatgctacctctaatattcagggtctgatttccagggcagcagaggggagggtggacagtaagggtgtggtctgcatggcttcctggtgctccagggatggggcaggtgttccctccgtggtgttcagaggggagagaggtgtctgaggttcagcattgatgagtggagcagcggggtctttccccctccccgagcaggattccaggagacatcacctctggttgagactctccactgtctcatgtacataacaaaatctctccaattttctactgaaagcaacacgtggcacagctctgcaggaccccacaccccgaccttgtcctgcaggatgtgtgacgagtagaagagggagaacaggtcgggtcagcaggatttggggtccagcctgacttggacacgtggaagatgctggggctgatggaggaggaacagaggcgggcgagttggaaagaggacagacagacggtcccttggcagctctcatttctcatttccaagggcccctgaggatgaacccctcacccacacctgtagggtccctgggccatctcaagacaagagaggaggccttggtgggatctgactgtgatgagggtgaagtccaccccgagcagaaatgagtgatacacaacacgtgctgtgaataattccctaacttgccagggagcaagtgcacggcccctccttagtctcaggggtgccctgagcccaagcccaccaggtgagcacaggaggggccgtgtgagcggcacccacagctggagtgcttctctctaaaggagcacgttttgggtggactcaaccctcaccacagtcagatcccaccaaggctctgtgctcagggcacccggagactaaggagggaccgtgcacctgctccctggatgagttagggaatgattcacagcacgtctcatatgtcattcatttctacactgtattttctgtacgtatgctttctatatgtatgctctctcctttactaaaacttttaaagcaatacttcaatatataaatttatattttttatttcaattatatgaacctattatttaaaaacatttaattttactttgcctttcattggggcttgatttaatttatatattcaatgtagacatccatttttcattaacctcaagtcttcctcctgtacatattaaaaatcgaggtttccttaacgaacttcagaaatgtttggatgtttccaagcacaatggcccgagcgaaactgactgggcggctccctgtggcatgagaaacccgggggaggtcagcgggagctacagtgcagctcagccctgggcctggggggttcatgcccaaccttgtccaatcactggataattctaacatctaaataaacgtcttttatatgaaaaaagtgctttaaattgttaatttagatttaaattagaacagggcaatttggtagtgggttaatatgaaatacaatgaatatacccaaaccagtggctttctcatgagtacttatctctcgttttaaaaaatgtaaaggaatcaaatacttcacttataaattgttaaaggtgttgaataattctttaaattagaacgaatataattaaaaaaaattttttttgagatggagttttgctcttgttgcccagtctggagtgcagtggtgaaatcttggctcactgcaacctccgtcttccagtttcaagcaattctcctgcctcagcctcccgagtagctgggattacaggcgcccgccaccatgccccgctaatttttgtatttttagtagagacagggtttcaccatgttggctaggctggtcttgaactcctgacctcatgatctgcccacgtcagcctcccaaaatgctgggattacaggcatgagccactgtgcctggcctgaatataattttttaaatgtctacccaggacacccacctctccttgacagggaggttatataagttatacataatcttatatagaatttgttatataagttacctctgaatatgtctcttctcctctgttttgattctcaggagcagctgagaccctcagcccaccacaaaacaagtccgattccaaggctggtgagtgaggagatgcttgccgtgatgacgctgggcacagagggtcaggtcctgtcaaggggagctgggtgtcctgggtggacattttaaaaaattacattcattctaatttaaagaattcttcaacacctttaatgatttataagtgaagtatttcattcctttacatttttaaaataagagataactatccatgagaaagctactgctttgagtatattcattgtatttcatgctaactcactactaaattgctctgttctaactgcttttcaatggatctcctctaatttactaatacaatttgtataaaccgtaagacaatgggaaattttacttctttatttctaaattatgtgccaatatttctcactttaaatgtcaatatatatgttactacatcttaaataaatatctgaagttttacatatatacatatttatgtgtggttaagtaagatacttttgaatatgtgtgtaagtatatccaaattcatttgatgtatattcatgcatatgcttaatatatttgatgcggtaggtgtttacatgtttgttcctggtctagattcacctagattcacacttcataaaaacaaatactgatttatgaaccttgagtgacatctccatttagcatatatatatatatgtttgtatgtgtgtgtgaatgtgggaaactgtattgcattctaggtgttactgcctatatgaggaattagttaactagagattaaatggaagatgaaaccccaggtgaactggctgaggctgtgtgaagaagaagcacccccagactttcacccctttgtgcttctgacactggggagcccctgcagaccaacctcccatgcatggagcctgggtcctccgctggtggataagtgaaactctcatctctgggggaattggctcatgtgctcctgtgtccctggctgcacagacagcgcacagggctcagtgacttctgtattcctttgcagatcctgagctcccagagtgcaggaaaacgccctccccaaatgcctcaggagtaacattcgaatttctagaatgcaagaaatctgaaataattcaataaggacactggagggaaccctgctacacaggaagggtttattgaggaactccctagaactcatgtcagaagacataggggaagataagaatgcagagcccaggggagaggctggctcagggctcttcccctctgtttttattctcaggagcagctaacaccctcagcccatcacaaaacaagactggtgagtgaggagatgctctcgtttacggtgctgggcacaagggttgggtcctgtcaagggtaaggaggtgctctgggtggacatccagaggtcctgggtgaagttgatctgccctgacctctgtgacctctttgcccaccatccccagcctcacacccccaggattacacagtggagaatctcatccgcatgggcatagctggcttggtcctggtggtcctcgggattctgctatttgaggctcagcacagccagagaagcctctgagatgcagccgggaggtgaacagcagagagaagaatgtacccttcagagtggtggagccttgggaacagatctgatgatgccaggaggttccgggagacaatttagggctgatgctatctggactgtctgccaatcatttttagagggaggaatcagtgttggattgcagagacattttctggagtgatccatgaaggaccattaacctgtgatacctttcctctctattaatgttgacttcccttggttggatcctcttctttccccacccccagacagacatgaggctacatcccacatggcagcgttgggtccacacctctgcacatctgtgtgctctggtccatggtgtgtaacacagtcttctttattactcattgccatactccctggtgtgctttactgagcctccatctcttcaattcagagttccaaacgtgcttcagtaactaaatcaatgggagagtatcggatttcaaccaggaaaagataaatccaccctgatgccctgacaccctctctgaaccctacgagcccttccctccttctcacatgctacctgtgcagcttctccttagatcattgtgtaaccatcactgccatcctgttccacacatggtcatcaccctacacccattcagcagccactccccattccctcttccctccagcacctgctaaccacaaatgtgctttctgtctctacggatttgcctattctgtctgaaaacatttcaatctcctttgacctgtgagctcctcacttcgagacttcctgcctttccaggcagaaccaaagtacaccacgtcaaaagcaatgataggcatttgcagtgtgttggtgatccacgaaaggaaaatcacggaagcaggatagaaatccagctgcagacaagacctcaggtcgatgaatcttgacaagcagttgagctgtttttttctactcacctaggacagtcaggcagaagtatgcaaaatgactggggctgattcttttctgaattgtcgcaaacagcaagaggacttgagtcctagcattaaagagttcaacatgtctaggtccaagaccactgttgtgtttgaaggatgtaaaaccctgctgcataggatggaatatttggagggaggatcctgaaaaacatgagggatcaaatagtcctcaactttctaggacaaagggagcagctatttgccatctaccctccagaataaagaaatcttatcattcaccatctaccctctagaataaagaaatcttatcattcgccatctaccctgtagaataaagaaatcttatcattcaccgtctaccctctagagtaaacaaatcttatcattcaccatctaccctctagaataaagaaatcttatcattcgccatctaccctctagaataaagaaatcttatcattcaccgtctaccctctagagtaaacaaatcttatcattcgccatctaccctctagaatagagaaatcttatcattcatcatctaccctccagaataaagaaatgttatcatttgccatctaccctctagaataaagaaatcttattaaggacattttcaaagccttaacagaatatgaatgattacaatattatgttttacctatacagcatcttccaagttctagtttggttgtgccaggccaaacatttgagccagatttcggcaagatcaagcaggagactctggcgtctgtcgctgattaccttcccgccatacctggccaccagcctttcccatggaccccacgtgtgtctccagactcttgggtatgaatcctgtgaacacactgacctctgctttctacatgactgacaagcactatgaaatttgcataaatatgaatagaaaatatactgtccccacatcccctaaaataaaactgagtcctcacccatgggcttttgctggattatactaagaaaaggcaggtcttacaacacacattccatagactcacatctcagagaagattccttccacaggctcagggtcctgaacacactgctccactctcagggctcggagacactctgcaggtgggtcttcaccccatccgggagccctaattccttcttcctcggtttttcatacagtgatttttcccagtactgctgtctactttcctctgccagaaattccttgctggatccatggcaatctcctcaggactcctatttcataaaatggaaatggaattcttcatatgccttaaaaagtaaaataattatccaaacaatataaaatacaaacacccatctagcaaaatatttcttagtacatcatgaattcaaatatatatcgtacaaaatgactgaggattttattaattttgagcaatattgaggttttctcataatatctttttattgttaacttcaaactaaataacaatcatgtctgggaataaaatgtataagatagtcatttagaaaaatttggagatttttccttccttgtccagtaaatacttaacattttacgtgcaatgtatgtcataaatatgggcattcccccctttgaggtatgtgttcattaatatacacacatatatatactcacacacacatatatactgtacagtggcatctacacatactatatatccacatataatgtatttgtatgcaatatgtaaatatatacacacataacacctagagtaagtgtatgtatacaatatatcagaatatatatgtgaattctttttccatacaaactgtgtaacatttctttacacatctacacacatatataccgtgtgtgtatacatatagtgcttatgtacataataggtaaatatatacacaaattaacatatatatgtatacatacatagaatttgtttttctatatacaaaccctataacatatgtaactagagagttttaccatatgtatgtaattcagattgaacattaagttgtatactcattcattttttttcttaacctctcagttcttgataaatatttctttgaatcaccaaatatatacaaatttatgttgtatatatttcaataacccatggttagatgaatgaaagtttacaattattttatcattttttataccgtctctctctcttttttttttttttaacacagatgagtctcactatgttgcccaggctggtcttgaactcctgggctcaagtgatcttcccacctcagtctcccaaagtgctgggttacaggtgtgagccaccgtacccagcacttaataccttcattaaaacataaaacttcactattttcaaaaaagttttgtattatgttacattttgtggactattaatgtttctaatagataattttaacagcatgtctttcttcccttactgattttaaattatgattttatattagatgatactattgtgtctcatgcctaatgtgttattgggggtgttgggctatttaactcatcctgagtaggggaatcactctttaacatacggggtaaaaaatgaataatttagaataatttcatgaatttagttaagtattcgattatatatttttgaatgaagattcatttatccttgtcctttagaaaagacatgtactcttatatgtgtgtgtagttacattcgtgtgtgtgcgtgcatgcaattttcaaatacttgcctgtttcccacttttcatcaccggcatctcacatcctacattttggattcattgatctatctggataacatcatttaaaattgctttcactgagtatgaaaacagtaatatctagtaacttgcagctcagataatgctttatttttcctcccactttctctatcaaaatagatgaaaacatttctatattaattaaagggtaagatataacacctggaagagaaagcacatctgatgattgagggatccaccctccaatccctcctcagccctcatgcaggggaagcccaacctaatgggcttcacaggtctgtcttgctctgagcctttttctgcttaggaattggtcccctgctgacccctttaacttttaggtattaacctgagtaagcatagagttcctcacttgctgttaatcccttgagagtacattttcaacatttccttgcctttcatttttctgttgggaagtccgatcccagtgatcatgctattctactgacatgttgagttgaaaatcacaggacacaaaaatgtgttttaaactatacaatttatgctagacaatttcagtctagcatatatactttttaatctacttctggtatttttcaatttatcatggtaggtcaaggtttacattgcatgtttaaatgtatgcatcttagcacttaattagtctttcctcgtctctgtcaaatgttcaactctttaattcgtgagctgttgccagacattattctcccttctttccttctgacacgtacaatagatatgaggttctccctcctcacaatattcccccaaatatggtgaattttcacttttggtgtctccatagtgcattctggaaaattctcccaattttgttttccaatttaataaatgtctctttagctgtatcttgaccttgatagaataaatattttgagtgtgcttcttcaactgaatttttgcctctaggatttctaactcatttctctgatgctcattttttgccagtataatccatattcttgtctcagaaatttaatttcctcttgtatttttttcagatatttaaacatgtttaattgaaaaagggtcttatgcgttcctagtattctatttctttgcacataataatccttatcaacaaatgtgtagactgatgatcatagcactttttatcattagaaggatggctcttggttgtctatttttgttggacactcacctcctacactcctgagctaccatggagggatcctctcaaggcagtttttagtaatccaggactgaaaatgggggactgttccagctactgatgacacgtggcattcatttcccaaacatagtgtctgctcaggttgctcccagaaggaaaaaaatgcatgtgaaattcacactcatggccgggcacggtggcttatgcttgtaatctcagcactttgggaggtcgaagtgggcagaccacttgaggccaggagttcaagaccagcctggccaacatgacaaaaccccgtctctactaaaaatgcaaaaaaattagccaggcctggtagtgggcacctgtaatcacagctactcagaaggctgaagcaggagaatcacttggtcatgagaatcaggcaggagaatcacttgggaggtggaggttacagtgagtggagatcatgccactgcactctagcctgggcaacaagagcaaaactccatctcaaaaaaaaaaaaaaaactcatacccacacatgatacagatacccacatgtaagaactctgcagtgaatgaatttgtttcacacacacccaggggagttggctcagtggtggccatgggcctgggtcggtaaatagacatattccatcacagctttcagccttgcccagagccctggcccttctctgcctgtgaggacccagggccccttttctgttctgcacagaaatggaaacttcctccctaatgacccctaatggcaccagacacagatgccctctctgtttcgtgtgtatccttctccttctgatgaactttcatttctcattttctggacatgactgtgataaccggggtgttgatgaaatattatgagaagcatctctcaagggcaggaacaaaggggctctccttagtggaaacatcaatctcaggccttgatggtgggcgccagcatcccctcatgcccccacccctcctgtcttcacctgctctggaaattacccatggctgagccccctgcagcccccaggctccaatgacccagctcccctgtgataaatggggttcatgacaggctccaaatgaggaaaccaaggctcagagatgggaggttactgcccaagttcacacaggcagggggtgacacaagaatatttaaataaagacaagatttcccctcaaagcagagtgctaaccccacgtattgtcccagaaccttgaactcaggagcacaggatgggaacaggagtgtttgaaagaagacgggggcaccaagaaggcagagtcaggtcaatgttgtttccagggagacgggggcggatgctgttgcgatgagtcaatgagaagttcgtgaagggaacgtttttgcataaagaaaacccacactccagttctggggaaagagtcatgattccttcccttgtctccctgtatttcccctttctgttcattgccgcaataaagctcaactggaactgcagagcaagatgtgagatgagtctctgctgatgtgagtctgccccgcagcctgaatttgcatcttccctgaagcttccccaggactggtgagaagactggccatggtagtttccccacaagagtgtgtttatgggtgagctgaaggagagagtgaaaccccatgaggaggctctgagaggaaggaagaaccctccgttgccttcacctggaagggatcaactcaggaaggcaccacgtccatttgcagccacgtcctggcccttaatgagaagaggacaggacaggcagacagtgaaaggagatgaggagagaccccatgtgtgtctgaaatatcaacagaaagcctggtacctgtctcaggccaagcactaggaaaacaagagccaggctcgtggcggggtccgggacagtacactacccatggagatgctggtgggaaaatcctgtaagggagagaacccttcctttgtgtgtgttctgtggacaccatggtcttatccacccacacagccggggccagtaggaggaaacatcatgactctcacccacacggccatggtccacttcactgagatttgacaaggggaatgggagattctagcatgagagggaccctgccccacaggtaggccctggtccagtaggagaccccaggggattagggaagatctcaggaaggagaggacctgcccaggcttcaggggcaaatctctcagcgggaactctcttccagggctgagtctgggcctcaggacctgcgtgcaggcaggtgagtctgtccccagctgtcccaggtccctcctcctcaccggggacagggtcccacccccgggcagctggggctggagaacagcaactctgggctgactgagagggatcatggggggatcttgggctgaaagctgggatctgaggggtggtaaatgatataggacccagtttctgatttccttccagggaccctccccaaacccacgttcagggctgaaccagactctgtaataacctaggggaggcccgtggccctctggtgtcaggagaccctagaggctcaggagtgtggtctggataaagaggaaagcccagtgttcaggagcacacagagctcgccgaagcccaggacagcgtgagtcctccgtctcactcaggacaaagcaccatgcaggggaatattgctgtgagtatttcagtcctgctggcaggtgagcactcagagaccccctgcagctggtggtaacagtgaggggacactcaggggccccagccccaggctctgccctcaggaaggaggtttgctcttcggggcatcttgcctctcagagcccaggcctgggggatgatgtgggaggtgtgagccccatttaacacggtgcctccttctctcctagaattccactaataaaggtcctatttgacagttccaatattggaaataagagttccatcttcggccaggcacagtggctcacacctgtagtcccagtactttgggaggccgaggcaggcagatcacttgaggtcagaagttcaaaagcagcctggccaacatgacaataacccgtctctactgaaaatacaaaaattaacctggcgtgtggtgtgcgcctgtaattccagctactggggagggttcgcttgaacccacttagcacctggaaagcgagagcacggactaggctgacccagcccgcacctgcctctgcccatacccccaccctggtaggttaacacaaaggacaaagactttcgggagctcaatggcctcgccctttgcctgagacaccggacagcctcccttgcgtaacataaggaaggcaaaaagcccatgaagaccaacacagcaaaattcataattgcaaagatgtggagcgcttttgcaaccgctgcctccgggctggaggccgactgacaccgtgcaggacagcatccgcaggctcaataacacagcacccaggaaggagaacacgtgtgcatgtcctcagctatcaccattgccagcaaccccctggataaccaagaggtcctgagtctgttcacatggccggttcattaccaaagctggtgtttgagaaagccaaaaccccaaggctatttataaccgaggaaatctcacatagtgtatctcactcctgcaaacttcaccagcccgccccactccctcgccccacctcagtgtccccgagccactttgcttgcactcgctcgcccacagccactgccgccagggctttgccagcattatgtgctcctgagcagaccttctctcccctccccaacggcatgtgtgttgcacgtgcacctcgcagtgccacagctgccggtgtgagttcacccactcacccaacgacccccgagcactgggactgctgtcagagcattcgtgggtacagagattccctgtccagtacccatctgtcctccaccctcccggcgccaacactaccaccggtgtgatcacacacagggagaccagcggatccacccccaccgcaaacagcagcagccgccagcgtggaagtgcacacagagggtgcacacagtcccatgaggccggagccccgccaccttgctaacaccactaccggtgcaaatgcgcacacgaacgcctgcggggctcccgcgcaccccacccagtcttgctgacgccaccgcattgaacaccgacatggaggccagcacccctgcacccactagcatcccactgcagtcaacaaatgtgtacatcccagaggaaaagacatcattacatcagaaacacacttgcatacaaatgttgattgcagcaaaattcataattgcaaagatgtggaatcgacgtaagtgtccatcagctgatgagtgaatgtggcacatatacacaagaaaacactattcagccattgaacaaaatgaaataatgtcttttgcagcaacttggatgaagctgggggccatgacactaagtgaactaactcagcaatggaaagccaaataccatatgctctcactttataagtgggagccaagttatgggtaatcaaagacatgtaaaggggtgtaatgaacactggagacccagaagggagagagggggtggagagtgagtaatgaaatactatgtaccaagtacaatgtacactacttgggtgatgggtgtagtaaaatctcaggcttcaccactatacaattcattcatacaactagaaaccacttgtaccccaaaagctattgaaataaaatacatttttaaaaaaactgtaatacaaggctacagtaaccaaaacattatggcactggtacaaaaacagacacatagaccaatgaaacagaataaagccacacacctacaaccatctgatatttaacaaggccaacaaaaacaggcctattcaaaaaataatcctgtgataactggctagccatatgcaaaagaatgaaactggacagaccctacatatcaccatatacaaaaattaaatcaagacagattaaatactttaatgtaagatttaaacctataagaatcctagaagaaaacatggtgaaaccctgtctctaataaaaatacaaaaaagaaaaaaaagtagcctggcatggtgacaggtgcctgtaatcccagctacttgggaagctgaggcaggagaatcgcttgaacctggtggggaaaggttgcagtgagccgagatcacaccactgcactccagcctcggcagcagagccaggctccatctcaaagaaaaaaaaataggaaacatcttccttaatacaggcattggcaaagtatttacagctaagtcctcaaaagcaattaaacgaaagcaaaaattgatgagtgggacctaataaacctacagatccagcaaaggtctaatattcagaatctgtaagcaacttacacaaatcaacaagcacaaaacaaacagccccattaaaaagtgggcaaaagacgtgaacagacacttttctaaagaagacacacatatgtccaagaagcatatcaaaaaatcttcaatatgactaatcagtagggatatgcaaattaaaactacaatgagatacccacaccactcagaatagttattattaaaaagtcaaaaaataacagatgctggtaaggctgcaaagaaaatggaacaagtgttggtgagaacgtaaattagttcatccactgtggacagcagttgggagatttctcaaagaactaagagttgaactacaattcggcctagcaaacccattggtaggtatatgcccaaaggaaaataaattattctaccaaaaaggcagatgcacctatatgttcattgcagcaccattcccaataacaaagatgtggaataaacccaggtgttcatccaacaatggattggatatatggaccatagaatactacacagcaatcaaaatggaaatcatgtcctttgcagcagcatggatggagctagaggtcattagcctaagtgatgccatgtggaaacagaaagccaaacatagcacattcttgtaagcaggagctaaacactgggcacatgtggacatagataagtgtctgttcatgtcctttgcacactttctaatggggctgtttgtttgttgcttgctgatttgtgtaagttgcttctagattctgaatattaggccttcactggatctgtaggttaatgaggtcccactcatcagttgttatttttgtttaattgcgttcaaggacttagctgtaaacgctttgtcaatgcctataacaacaggatgtttcctgtgattttttttttctttgagacagagtctggccctggcaccggagacacttagagtggggagagagggaggagggcaagggctgaaaaagtgcctgttgggcgctatgctcactacctgggtctacggattcattcgttctccaaacctcagcatcacgcaatatacctttctagcaaacatgcgttatgtgcccccgcattctaaaataaaagttgaaaacaataataataatatggaactaaaaattaataggcatgcatcttagcaatataaactcaagtacaaaatggaagaggcccacgttttagagattttgaaatttaaaacacctataaatgtgattgtatatataggcatgtagggacaactgggcttcatctgtaagaactacaggtggaaagtggagactccttactggcctgagagcaaggagacagccctgagtcttggtgtctgaggagaagaagtatgtgtttctgttcgattcttggtcagaaaaaggtgttataaagaagaatcttggttccctgtctcttttctcatgccagatacttataatagtaactatacatgtgtatatatatgtgtatatatatatttgtctttataaaagctcacatctcccaagtatcacacaaaaccctttttgtctttttttctacaccccatggagaagtacaaacaggatgtgatactctaatatcactcagttttctaaaataagtaggttgcaatttcctatgaagtgaaactattcctagttcacattgagaaagtaccagattcagtttctcataggaccaacaattgtctggaccaagggaaattacaaatggtctggtcttacatttttctccagctacctgtgatgatctct[136 bp omitted]catgatgaaaccccgtttctactaaaaatacaaaaattagctgggcatggtggcaagcacctgtaatcccagctactcgggaggctgaggcaggagaatcgcttgaacctgggacgtaggaggtcacagtgagctgagactgccctactgcactcccagcctgggcgacagtgttagactctgtctcaaaaaaaaaaaaatgtgtatcactcaaactgacaccttcatggatcttagaaccctgatcatgttcccatgagaattccattcattccattcaagaagatctaactttcacatatacaccatggaatactatgcagccataaaaaatgatgagttcatgtcctttgtagggacatggatgaaattggaaatcatcattctcagtaaactatcgcaagaacaaaaaaccaaacaccgcatattctcactcataggtgggaattgaacaatgagagcacatggacacaggaaggggaatatcacactctggggactgttgtggggtggggggaggggggagggatagcattgggagatatacctaatgctagatgacgagttagtgggtgcagcgcaccagcatggcacatgtatacatatgtaactaacctgcccaatgtgcgcatgtaccctaaaacttaaagtataattaaaaataaataaataaataaataaataaataaataaataaataaaaaagaagatctaactttcctaaatatctatgcatccaacacagcagcacccagattcataaaagaaatttgtaaagaccttcaaagagacttagactcccatacaataatagtgggagactttaataccccacttacaatagtagacagatcatcaagacagaaaattgactaagataatcaggacctgaactcagcacgatagatatctacagaactctccacacccccaaaccagaatttacattcatctcatcaccacatggcacatgctctaaattcaatcacataattggaagcaaaagactcctcagcaaattcagtttgttacaactgaaattggcacaaaccactctctgaccacagcataatcaaattagaaatcgagactaagaaactcacttaaactcatacaattacatggaaattaaacaacctgctcctgaatgacatcagggtaaataatgaaattaaggcagaaaataagaagttattacaagctaatgggagcaaagatacaacatgccggaatctccgggacacagctaagggggtattaagaggaaaatatatagcactaaatgtccacatcacattagttgtgatgacctaacatcacaactaaaagaactagagaacgaagagcaaacaaaccccgaagctagcagaatacaagaaagaaccaaaatctgagctgaactgaaggagattgggttccttcacacacaaaaaaatcattcaaaagatcagcaaatccaggagctggttttttgaaaaaaataataaaatagactgctagctagactaattgaaaaaagagaagactcgaataaacacaatcacgaatgacacggggaatattaccattgaccccagagaaatacaaacaaccatcagagaatataatgaacccgtgtatgcacataaactagaaaatctaaaagaaatgggtaaattctcagacacgtgcagcctcccaagactgaaccaggatgaaattgaattcctcaacagaccaataatgagcctgaaattggttcaacgtacacaaatcaataaacagattcatcacataaacagaactaaaacaaaaaaccacatgattatattaatgatgcagaaaagccttctgataaaatttaacatcacttcttgttaaaaactctaattaaactaggtattgaaggaacatacttcaaaataataagagccatttatgacaagcccacagccaacatcatgctgaatgggcaaaagctgaaagcaatccacttgaaaactggcacaagaatgccctctctcaccactcctattcaacagtattggaaatactaggcagggcaattgggcaagagaaaaaaataaggcgtattcaaataggaagagaggaagtcaaactatctttgctgcagatgaaatgatcctgtatctagaaaacatcaacccaaacatcaacctgagatcttcttaagctgataaacaacatcagcaaagactcaagatacaaaataaatgtgcaaaaatcactagcatttatataccaataacagtcaagttgagagccaaatcaggaatgcaatctcatttacagtttacacacacacacacaaacacacacacacaatacctaggaatacagctaactaggagggtggacaatttcttcaaggagaactataaaacactgctcaaaaaattagagatgacacaaacagatggaaaaatattccatgatcatgaataggaagaatcaatatcttaaaaatggccatagtgctcaaagccatttatagattcagtaatatttgtattaagttatcattgagattcttcacagaactagaagaatcatatggaaccaaaagttttaaatttaaaaattcatatggaacccaaaaagagctcaaatagtcaaggcaagcctaagcaaaaacaaaaaccgaaaaccaaagctggaggcattatgttacctgacttcaaactatactacagggctacagtaaccaaaacagcatggtactggtacaaaaacaaacacatagaccaatggaacagaatagaaaacccacaaataaaaccacacacctacaactatctgatctttaggaaacctgacaaaaaaaaagtgatggggaaaggattccctattcaacaaactgtgctgggataactggctatccatatgcagacaattgaaactggaccccttccttacaccatatacaaaaaaactaactcaggatggattgattgatggatgtaaaacctaaaactataaaaacctggaagacaacctagacaatacattcaggacacaggcacgggcaaagattttatgactaaaatgccaaaagaaattgcaacaaaagcaaaaattgacaaatgagatctaattaaaccaaagggtttctgcactgcaaaagaaactgtaaacagagtaaactgacaatctacagactgggagaaagtttttgcaaactgtgcatctaacaaaggtctactctccagtatctttaaggaacttaaaccaatttacaagaagaaaacaaacaaccacattaaaatgtgggcaaacgacatgaacacacgcttttcaaaagaagacatacatgtggccaacaatcatataaaaaaagctcaacatcactgatcatgagagaaatgcaaatcaaaaccacaatgagataccatctgatacctgtcagaatggctattattaaaaagtcaagggacacatgttctcaggacctcctgagtgctgatcactcatatttggctcagaaaaatctcttctaatatattacagagtttgactctttttgtccacaataatttggtgcctgaacacgtgaggcctcagataagactcaggaccccaaaggagttgtctcaacctggagctaaggtaccagcaggggcccactgaaagcctccaggattttgagcttcttctctgccagaagtggtaagtcctcctgagccccgacctccctttggttgacggccctttatttattctgatctactatttctttttctttctaggaagttgttgtttaaggatcctacttctagttgggagatacattctaaagggtcttctccattgcttttctccccaaattaatctcgatttggcttgtctgttcacatttgcatgaggaactgaactgttgttttcatagggaaacgagagactgtgtttcctcagcttaaaaaagaaagggcattttgctcctcccagccaaaatgtgggaagtgatgaggggtgcttgtgggaatgtctgggggtggatggaccccatcgtgatgtgagtggcctacagggaacacccaacaaaatgagttttaaaaaggcttgtccaggaagcacatatgggagctggtcactctgcattttgggccctcctggaggtgtttagaccttccgagagagaaactgagacacatgagagggaagaaatgactcagtggtgagaccctgtggagtcccacccacaaccagcacactgtgacccactgcacaaacctctagcccacagctcacttcctcctttaagaagagaagagaaaagaggagaggagaggaggaacagaaaagaaaagaaaagaaaaagtgggaaacaaataatctaagaatgaggagaaagcaagaagagtgacccccttgtgggcactccattggttttatggcgcctctactttctggagtttgtgtaaaacaaaaatattatggtctttgtgcacatttacatcaaggtaagagagccctaatggcggcttgcacgctatagagttcctaagttctctctttctctattttcttttctgcctgctttacatctgctgttacctttctactgagataaaaaccactgtttagatccaaattttttttgcaagctggtaaatttatattaatatctcatggctagagttttgaagtaaaagctacaggatgtctgtgtgtgtgtgtgtgtgtgtgtgtgtgtgtgtgtggtgtgtgtgtgtttaaaagcctttatgatagatttgtataattttatgtttaattggcagtgaacccattttaatttccctctaacacaccagacttcttcctctgtactttgagatgtaagttttgctgattttttctcctaaaaagtgtttcctgtaacatggaaatttagggttatttagctgacaactgcctggggtaaggaaacaggttatgaagagtttgaaagggttgggcgtggtggctcacacttgtattcccagcactttgggaagctgaggtaggtgactcatgtgagatcaggagttcaagaccagcctggccaacatggtgaatccctgtctctactaaaaatgcaaaacttagccaggcagtagtggcacactcgtaatcccagctacttgggagactgagacaggagaatcacttcagcatgggagatgtaggttgcagtgagctgggatcatgccactgcattccagtctgggtgacagagtgagcccctgcctcaaaaaaaaaaaaaaagaaaaaaagaaaaaaagaaaaaaaaagagtttgaaagtttgagatagaaaaaaaagaggttttttgaatctataagatgtacttctatcagcatgcctaatgcgtccatgaatctgtgtgtggtgtacataatgtttcactactaaaaatatacaaaagagctctaattaattggcttaaagagaataaaagtgcttaaatcaaatactttatcaggacaagatgcttcttcaagttcacttaagtaaaatctttaataaataagctggctttaaaattattggtaaaataagattagaaatgtcttaagaattgttagcgtttttgtttgcacttattgcacaagtggttttgtgcttatccctgcagaatagtataagattttccataagggttataaaactataaacctggccgggcacggtggctcacgcctgtaaccccagcactttgggaggccgaggctggtggatcacctgaggttgggagttcaagagcagcctgacacacacaaaacaaaattataaacccagcccaaaacagaatgatctttgcttgtataatttttaataaataagccatgtaatattgttggttaaataaaaacagctaactactgagatattggttaaaaaaaataactttatatttaaccataagttcccttacttaggtaaacacctgaaattcatagtttataacattggttaacagggaattaactttaagtgatgactgtcacagtgttcataaataatctaggtaaactattaaataagtttatcaagtaaatgcaatggaataaatgcctataaacaaacttgtcacataatttacaatctaaagttatattaaataatagatattaattgattagctgggtaatttataatttaaaaattacaggaaaacatttttaaaaaacaattcttattaaaagataaatatctgtgtttaattcaaagcttttttaaaagttatgtataaaacaagataaatggaaacaggaaataagagatgtaaagacagttataaatataaagaggaattttggtaaaaaagatgaaaaggaaagtaattttacacaagaaagtcttatgtagtgaatttttgtcctgaaataaaataactgatagttcaagaaagagggatatttaggacaaaacaggcagtttaagcatgttgtaagtggtctctgtaagtcacaataagactttttttaaaaaaagaaaggtagtgtaatgtagttggttatgattaagaaatataatagtcattctacagatgggtctttgatatttaaaaaacacaccctaatccaaaactaaataattggttaaaacaaggttttagtaaaatattaacttattcttaatgcaaaaagtttttaatttttaaattctataatctgtctttttgaaattcttccaatgaatatatcaaagttcagctttttctcttttgaaaggccttggatgatagctctctccttcaccttgtgttggcttctgtaacttttattaattatctaaagtaagagaggaatttttatttaaaaacagaaaaatgaaatatcctttagacctgctttttttcttctgtatgcctgttatatctgtatcttcatatgtgttatctggaagtgatatttcactaccaaactacatgaaacagctcatcagttgtcttttttaaaaaaaagtaagtgcttatcagattggcagacactagctaagatgcctttgaattcacctgattttaatatttagtaaaattaatttagtaaatttaatcttaaaactctctccagtaattagagctatgttatgttaaacctcgttttttttttttcacttgaaatttgggttactaaattaaaatagtaggagtataaaatgtttttggtgatgcatataaaacacaaggatataggttttgcaaaaaaaaaagtaggtttttttctagttaagaaactatttaagagttgctttaaaatgaagaaaaaattacggagataaaactaaataaaaagaacaatttagccaggacaacaaaagttaactctgagacctgtgattaccaagaagatagttgatatagaggaagggcaaaaacaagtaactattaaaaccagagggtataatgcaaaggaattgttctgctttttagattgttataatcagtttcttaaaaataatctatgtggtagattgtaaaaaataaccactttaagggccaaattcttaattttttttttgagatggagtcttgctctgttgcccaggctggatggagtgcagtggcgtgatttcggctcactgcaagctctgcctcccaggttcacgcccacattcttaattttaaatgcttcagaatttaagagcttgtttggattgatgcaggacccgtagctcactattaaacaatcactaatgagtatatgagatccaaatgcacaggaggttattccagagagaacaaccagcttagtggaccagacaaacgccactgaaaggtctgttggccctgagaaggggactagccaactctccctataaaacaccaagtgcagcatcccagatgaagcagtgaatatgctttgtatgcgagccaggtggggctggtgtatgaagcatatgaaccaagtaaccattaaaatcaatcaaccgttggtggacacttagtttggtttcatgtctgtgctgttgtgaatagtgctgcaacaaacataatgagtgcagttgtcttatttatttatttattttttattttttgagatggagtttcattcttgttgcccaggctggagtgcaatggtgccatctctgctcactgcaacctccggctcctgggttcaagcgattctcctgccttagcctcccaagtagctgggattacaggtgctcgccaccatgcctagctaattttttgtatttttagtagagacagggtttcaccat[138 bp omitted]taccatgtaatgggattgctaagtgaaatggtagttctatttttagttgagatagctccatattattttccatagaagataaactcatttacattcctaccaaccatgtatcttgctaacatctgttggttctgacttcttaaaagtagccattttgactggtgtaagttgatactcagtgtggttttaagttgaatttctctgatgattaatgatgttgagcattttttaatgtgtttgttggccacttatatttcttgttttgagaaatgtctgttgatggtctttactcagttttccataaagttgtctgtgttttttgttttttttttttcatgttgaattctttgacttccttgcagattctggacattagtcttttgttggaggcataatttgcaaatattttcttccattgtgtaggttgtctgttcattctgttgattgtttcttttgctgtgcagtagcttttaattttaatcatgtctcatttgtctattcgggggtttgttgcatttttaagggtctttaccataagttctttgcctggactaatgtccagaagggtttttcctaaattttgctttaggaattacatagtttcaggtctcacattgaggtctttaattcatcttgagttgatttttgtacatggtgggagataaaggtccagttttattcttttgcatatggctacccagtttttccagcatcctttattgaatagggtgtcctttccccattgtttactttgttgactttagcaaagctcagtatgttgtaggcatgtatctttatttctagtttctctattctgttcccttgatgtctgtgtatatttttgtactagtaaatgctgtcttagttactatggccttatagtataacttgaaatcaggcaatgtgatgcctcctgttttgttctttttgcatagaagtgttttagctgttcaggctggtttttggttccaaatgaatttaaaaattgctttttctctaattctgttaaagaaatgacatttgtaatttaataggaattgtgttgaatctgtagtatgctttgggcaatatggtcattttaacaatattgattcttcccatttgtgagcaaggaatatttttctatttggttgtgttgcctacagttcctttcatcagccttttgtcactctctgtgtagaggtctttcacctccttggttaaatatactcctcagtgtgtgtttgtgtttgtgtgtccttaatttgattctcagcttgaacggtactgatgtatagaaaagctactgatttttgtagcttgatttttttatccagagactttactgaagtcacttaccaagtctacgagtcttctggaagaatcttcagggttttctgggtatatgatcgtgtcatcagcacacacagataatttcactttctcttttccaatgtggatgcactttctttctttctgttgcctgattgctctggctaggacttccagtactgtgttgaataggagtggtgagagtggacatccttatcctgttccatttcttggggaaatgctttcacttctccccattcaattttaaggttggctgtgcgtttgtcttataaggctcttattttggggtatgtttctttcatgcctagtctgttgagggattttatcatgaagggatattggactttctcgaacgctttatctgcatctattgagatgaccatatgctttttgttcttagtttatgtcatgagtcacttttattgacttgcatatattgaaccatcctttcatccctggaatcaagccaacttgatcatgatgaattatgtttttgatacactgttagattccgtttaatagcattttcttgaggatttttgcacctgtgttcctcaggtttcttggcctgtagctttatttttctgttggatccctgtctgattttgctatcagggtgatattggtttcatagaatgagctaggaaagaatcccatcgccttgattttttggaatactttcattatgattggcaccagctcttcgttgtgtatatggcaaatttcgactgtgaatccatctgttcttgggcttttttgccggaagatttttagtactgattctttttggttacttgttattggtctgtttagggtttctattttttgcctgtgcgatcttaggaagttgtatgtgtctaggaattcatccatttctctaggttttctagtttacgtgcataaaggtgttcatagtagtctctgatggtcatttgtatttctgtggcgttggttgtaatgtcaactttatcatttctgattgtgcttatttaaatcttctcctttttttggttagtgtagtcagccatctctcaattttatttatactttcaaaaaaccaacgttttctttcactgattctttgtaatgtttttgtctcaatctcattctttatctgtcctttcagagtttccattgttttcagcatccatcactagcaagccagtgcgatcctttggtggtgccacaatattcagatttttcacagcgtcagaatccttacactgattccttctcttctggagaggcctccacttactctcttcgaatttattttcatttggatgggatttgttttgcacattttcccccggccccgcagggagggtgactgtagagcatgttgggaagggtcttttggcttttcccatggctttgggagcttctgcagcagggtttgtgttgggctgtgcagctcaaattgcaggccaggagctggtgcttaagggtaagagccaccctcggcacaagcaggtggatatggacctggtgtgtttcctgtgaggtgctgactgttgtttcaggggaagggctggaccgtggagtgtcaggtgccctgagctttgtgttccacaggggcgagggaacacccctgggcagagctggaacccccggcttgcccacagatatcccagtgatgagtgcaggcactagtcctgatggacatggctggagcagctcctagtgaaatgccctgaggtctctgcggggggtgaaggagctacaccgtttccagtcccatagggaggaacgttgtctgtctccctatcacacccgtgctccagggctcatgagtctcagttcagacacacacttttgtctctccccaggccacagtgtggctgagggccgtgggaaacacctgccttgccactctctgcaggcgtggttccaaggcagagcctcctccctcagcccagtgcagaccctgagcggctgtctgttgtctgacgtggtagctgcttcatgtaggtgggatgtggggcttctgcctctctggatgggagagtggacgtcagttgtggtggtgttgctggctgggtgggcccgacctcaggccctggggtgagtggtcaggtgccagcagggtaggaaagggcaggtagttcccggatcacaggcccctaggtggccggctggacagcgtgtgtgagtcctgaaggggctggactgggttttggctgctccggggttcagatgctggctgtgatggggagggatgggctggtccccagggcacaggcagaaccctcaggcggggcaggcagaaggctcaggtggtagagcctgcggcagatcacagacctgtggggactgggctctcagaagggctgggggctgcagctgaaatgtccaggtgggggcagggtggctgtgctgtgggcctgtcactagggagggcagggcccctctgctggggcactggagactggcagctgtgaggcacagggcccgctcacacttccctcctgaagaagtgtcactcggttttgctctggggacacgtgaaagtgccaggcctccccacaccctccctgggcctggggcagcagggacagaggcagaggtggcagtgactgcaaagggcttgtcaggggcctctgagcattggactttcagagggcactgagccagggccacggtgttcgggtgggggcaggacgggtgactggggccctgcagctggcaagccccattagcaggaaggaagccccatttcgcaggaagcaacagaggtgggcagctgtgtggtgctcagcttggctgctcctgtgccccagctgtcatacttattctggggcccacagaggtgcctggcctcctccctccctgctaaggcagtggcagctggacccaggctgctcagggatcagaagcctgtgggattccacgtgggctccagaggcgcctctgcaccatctctgggaactccctgtgcctctgtaggccaaggggggtcaggggctctcctgtgaccaggattgtaaagggccaagacaggggtgtggatcccaggggcctcacacccactcaatctttccctttgttaaggagcctctcactcactcaccccttccccgtgttagggagcctcgcactcactcaccccttccccgtgttagggaccctctcactcaccccttccccgtgttagggagcctcgcactcactcaccccttccccgggttagggagcctcgcactcactcaccccttccccatgttagggaatctctcactcactcaccccttccccgtgttagggaccctctcactcactcaccccttccccgtgttagggactctttcattcactcaccccttccccatgttaggagcctctcactcactcaccccttccccgtgttagagaatctctcactcactcaccccttccccgtgttagagaatctctcactcactcaccccttccccgtgttaggagcctctcctggctcccaccttttctcttctcttctttccatgtcctcatgtttctcaggtgaaccccagcatcctcttggaagatccacttgacctgttggtatttactcactattttgggtcctcttagtgagtaggcagactccagccctttccattcagccaacttgaacctcagcccacaatcattttcttgtcactttttactcttgggaaatccggtcccaatgtgcttgtctttcatttgagaataattttcattttctccagtagttttaaaattactttgtatctattctaggtatcttttactctatcatagttaagacattgatgttatttattaatttgttcacattaaactcatgttctttcttcatttctgtaaaaatgtcaaccattttctttgcaatatttactgaataacgtactccttatttccttcattctgaaagtgtgatccatagagagatacctgtttcctcttctcattccatttcttgtgtgcattaattatgttttctactttattcatttctagtttttctctgatgactaatgaaaaatttaatagatattccacaccaatactatgctcatcatttcagctgtgtcttgttcttgatgcaattatttctaaatgtgttgatatgatttactatttttcacctcacagtagcttcctaattcatttctataattgcctgttttttctgtaatggactttttgatttttatttctcttgggtgggtttttctcccacacatgtgatcttccatacagtttctccccgggctgactcaggaaggaaagctgatgaggagcattgctgtggtcactcctgccctgcggtgtccatgctgccaagcttagaatcagctctgtgttctgtccggcatggtggggcccatgtgagcctcacactcacgtgctagagatgcctggtccagcagtgataaagcgcatctgtgtcatgcacacccgggaaggtggctcaatgctgagtgtggcccgggtcactgaggggagctatcccagggtctgtccacaaacacagaagagggagaacaacagtctctctagggtcccacggtttcctccattttttgctttgttctgagagagagacaaagtgccatggctgctctgtgggttggacagatgcatgctttcacctgcaggctggaacccaagctgaggtcttcagcatccccaagtactgataaagcactttaggttgtttttagaaaacactgaaaaattaacccttttgctaaagaggtagaaacaagccctcccctcaacgaaattcctgaaactctcaggttaaacttcgtaacccaatcccttcactgcagacacccaataggaaagtcacatgtgcaaggatgagatgactttggtcaagctcagaccccacagggccaggaaggcctgaaggagaggaggcccatgcttccagctctcagataagagctgcttctaaggactttttaaaaaccccacaagaaacccttccatgtccttcaccccctcctgctttgacgaggtttatcactagatattctttaggatgtcaggaattcagataagatgctctcgagaaaaaacttgcccagcaacggcatctcctccaatggactgacagcaactctggctttgaacctctggaatcagggaactctgtttctaagcagctctgtcagcctctctcttgttgctgataagaacttcctttacttctgtatgtcagagagctctctctatggtgcttttcctctactctcacaccacaggaatcatcctcacagaagaagacttctaggaccagatgtgtgggattttttttcctagacccagtagcggacgccagctgagtgtttaaatgcttcttccccagtgccgtaaacaaatagcacttgaacataaatttaatttactcagcaagaccatttttattttctgcagcaagggtacactcaccagcagttttgcttcgagagtacacaaaacaaaagagacagggtcatttataacctgacacgtccaccctactgctctgtccggtttccactggctggaacaggacctcacactctgtatttgtcccgattggctagtaacttagaacttctgaaaagaggcaaaggtagagcagaacaaaggaaggaggaagtaacttgtggaatgctgagaaaggtgaaaacaccttcaaataaggaagaggaacaggctatgacctaatgcttgcttggaccagtataagcatgccagggcaaatatttaggctaaattgtgggagctaataacataaagtacattgatttatttatcacggctagcagatatttgagaatgttagcatagctctgacactgtctacccagagacagtcccagatcccacagattgaatggttcagtccccaacactgcccccacaccattcccaagtccagacctccagaacttctgactgactggcttcaagttggggaccctatgaccacctctttgggtttgattaatttgctgtagcagctcacagaactcagagagacactgacgtttcctggttgaatacaaagcacactgcagaggacacagatgaagagactcataggaggaggcatgggggaaggggcgcagggcttccataccctccctgggcatcaccctccaggagtctccacatgctcaaccacccagaaacccacgaaacccagtcttcttgggtttttatgaagcttcatgatgtcagtatttcctcccacaaggaacaggctgagaccatcttctgggagggtcttaagagccaccatcagaaaggcagggacattagagtcttgccttgggcaggtgaaggaagggcaggaggaggtcagaggcctcccctaaggcctaacacagccaatgttataacaaaagactgtaacaagggctatggagctatgagccaggaaccgcaggtgaaaaccagtgtgtatcacaacatcacacttccctctccggacacactgtggcttgccatgccatgcactccagattgtaatccttgcttctcactcccaaataaactcaaaatccagacaaccctggagcaacgcagccttgaattcctggggtctcttatatgcacacttttttcaaccaaacgggggtcaaaactgtagcatttgtgggatgcaagacttgtgtatatgaacggcagacttttcctatatgcaggcccagcagagacaatgtcggggctggagtacgagcaggtgttggtgcatgtagcgggtactgaaacgaattgcctgtgtatcccaagaaacaactctactgagagatcatattctctaggggtttatttttgtttttatttttattttaagttaaagcttcgggtagaacacccagtgtctccttgtccatctgaagaagatgctgctatgtggaagcacatccttgagatccacaaggagacactgggcaaggagacgagggtgccccactgtgcagaagtctccctaataaatgatctatgaacaccctggtgtttagtgcttctttctttggaatcccagcagctctgtcactggacggtttggtgcactcccttgagggaattcccctgggctgcttggggtccactccagcctcaggtgtagctggaggacgcagcctcccaccttggtctggagccctgagcccctcactgtcattgcagatcccgaggttcctctcctggctccactcagtggtggaaacctccaccctaatgagcccttgatggtcccaggtccctgtggcatctcacctgtggcctctgttctttcctgtggatccatctacacttgggaacttccacatctctttttctgctcatgacattgatgctctgggtatttcagaaatgcccagatagatggacaaatacacgtccatctatccattagggtcagatgtgagatccagagtggacacatcaatcacctacgtagactgtggagtccaacgccaagatcctcttatgtcccaaacacctcaggtcttaccctggtctggaaatcaggcacaaatgagcccctcctaatgttccagcaccactgaccgtacaaccactgtcacgagtgggatttgtgacaacagtcggcaaaggaagaatctgaggctcagagatggttcattaccgcccgaggtcacgtaggcagtggatgataaccagtcgttgaataaatataactcccccccaactccccaaatcaaagctcaaatataagtcattgttcccaaagcgttgaacagggattgaggtgcagagggacggccaagtaagcaaagggcaccgaggaggcaggaaagactcagagatttgttcccggggggtggggttggacactgtagcaaaatattttaaaaaggggaagttaagaggggactatttggttgaaagaaaacccacaatccagtgtcaagaaagaagtcaacttttcttccctatttccctgcatttctcttctgtgctcactgccacacgcagctcagcctgggcggcacagccagatgcgagatgcgtctctgctgatctgagtctgcctgcagcatggacctgggtcttccctgaagcatctccagggctggagggacgactgccatggtaaggaccccacaacactgagctgatggacggctgaaggagggagggtgaccatgtgggaggctgtgagaaggaaggagatgcctccgctaccctcgtcaggaagggcagacacaggaaggaaccagttttatttgctgctacatcctggctctcagtgggatgaaaacaaaccagacagacggtggctgggggtcaggaaagggcccattaccatctgaaatgatgcagagggcctagtgactgcccccacctcagccctaatggaatgagagcaagggtcctggggagggcagttccacttcctgtgtggctgcagatgacagcaccccatgagaagaaggacccagcctccgattggccacactctgtgtgtctctctatcctgccagcaccgagggctcatccatccacagagcagggcagtgggaggagacgccatgacccccatcctcacggtcctgatctgtctcggtgagatttgaagaaggaggggagcttctaacctaagagggacctcaccccacagccaaactcttgtccctaaggagaccccaggggctcacaaagatcccagggaggggaggacctgcccaggcttcagggggcaaatccctcaccgggaactctcttccagggctgagtctgggcccccggacccacgtgcaggcaggtgagtctgtccccagctcttccaggtccctcctcctcactggggacaaggggccacccccgtgccgctggggatggggaatagcagttctgggctgactgatgggggcgtctggagggtcctgggctgagagctggaatctgctgggttgggtgggaaatgagttagaatctgactcctgatttccttccagggcacctccccaagcccaccctctgggctgaaccaggctctgtgatcacccaggggagtcctgtgaccctcaggtgtcaggggggccaggagacccaggagtaccgtctatatagagaaaagaaaacagcaccctggattacacggatcccacaggagcttgtgaagaagggccagttccccatcccatccatcacctgggaacacacagggcggtatcgctgttactatggtagcgacactgcaggccgctcagagagcagtgaccccctggagctggtggtgacaggtgagctgacactcaggggtcccagccccagactctgccctcaggaagggggacggctctcaggggcttctccctctcacagcccagccctggggatgacgcgggtggtctgagccacatttaacacggtgcctccttctctcctaggagcctacatcaaacccaccctctcagcccagcccagccccgtggtgaactcaggagggaatgtaaccctccagtgtgactcacaggtggcatttgatggcttcattctgtgtaaggaaggagaagatgaacacccacaatgcctgaactcccagccccatgcccgtgggtcgtcccgcgccatcttctccgtgggccccgtgagcccgagtcgcaggtggtggtacaggtgctatgcttatgactcgaactctccctatgagtggtctctacccagtgatctcctggagctcctggtcctaggtgagaaattcacagcattgcctggagttccctgagtctccaggcaggtggggagcagccgcgtctcagggcagttccaggtgggatgatgttggggcgagagggctcagggctcctggggccagagacacaggaagatcagcagtgatgtggccccgggggaaagggaagatttgtggggaagcctgagggtcggctcctggaaaccatgaccaccttttcccaggtgtttctaagaagccatcactctcagtgcagccaggtcctatcgtggcccctgaggagaccctgactctgcagtgtggctctgatgctggctacaacagatttgttctgtataaggacggggaacgtgacttccttcagctcgctggcgcacagccccaggctgggctctcccaggccaacttcaccctgggccctgtgagccgctcctacgggggccagtacagatgctacggtgcacacaacctctcctccgagtggtcggcccccagcgaccccctggacatcctgatcgcaggtgaggagcccagcgggttcagtcagggacccaggctccgcacaggccctgccgggggagctcaggtagtgatggccgggatgagggatgggggtcccaagggagggagagacagacagagacaggggatgggcggggagggggagactcagagaaaacagagacagagacactgagggtcccagagggagacctggggaggtgtcagctcagagcaaggtggggcagcccctcgcccatccttcttctctccaggacagttctatgacagagtctccctctcggtgcagccgggccccacggtggcctcaggagagaacgtgaccctgctgtgtcagtcacagggatggatgcaaactttccttctgaccaaggagggggcagctgatgacccatggcgtctaagatcaacgtaccaatctcaaaaataccaggctgaattccccatgggtcctgtgacctcagcccatgcggggacctacaggtgctacggctcacagagctccaaaccctacctgctgactcaccccagtgaccccctggagctcgtggtctcaggtgggggccttgaccctgtcctctctgagctcaaagtctcagctcagaccctgccccaggagagctctgggctgggatggagtgagcgggggtctgagaggggctcagccagtgggagactcaccctcagagggaaggaggagaacagggccctcccaggcctgcccaccctcagtggcatcgccagcatcatggacaggagaggcgggtggagggaggggcctggggaggccacaggtcccatgtagagaaatttggtttgaggtggagacttcaggaaagccccagctcctcagcctcctctcattcttttacccaggaccgtctgggggccccagctccccgacaacaggccccacctccacatctggtgagtccctgaggcttctgaactcaagggagtgcggcctcccccagggcagccctgggtctcccagagaatcccattcccctcaaagactcgagcttccctccagggagccgggcagagccagaggaggggccacagggtccccagggctctgaggctgggctggtgaggggtggggggtcaaggcagagagaaatgttggggcccagcctgggggaggagcagccgggctgatgtggggagcagggcagccccagccctcacctccccgtcctgacccagcaggccctgaggaccagcccctcacccccaccgggtcggatccccagagtggtgagtgacgggctctgagtgggaggtgggcagggtccaggggaggcaggggtgggttctgtcctaggttcagtctcctctggaggtggtgatatagacaggctcctcccctgcttgggcctcagtttctccaaatgtaaaggtgagaggcctgcgggtgggaaagttcctttcagctctgactcccagctgtgacctcctgggagaggaggcctcccagggaacctcccagacccgattccgcgggggcctgtcccgtcccacctgcagcagagacggtgacctggggcaggggaggggagaagagtcatggttcaggacggtcaggctctttccctgcagctccggggctcggctctggtgcaggaacaagggctgcaggtcagactcctgggcttccttcccagctctgccgcttcctggctgggggccccgggcaggcgattcccctctctgagcgtcagtttttcatctgtacagtgggtggggtggatgtttctgtgctgcacgactgttgtgggggttggaggtggtgaacagaaggtccagcagtcacctgcacacagtaggcgctcatttcaatgacatcacccccatccctgacatcatcgtgctcaaggtctgggaaggcacctgggggttgtgatcggcatcttggtggccgtcatcctactgctcctcctcctcctcctcctcttcctcatcctccgacatcgacgtcagggcaaacactggacatcgagtgagtagggaatggggggaccctgagggctgaccgagggtgggctcagggcacagccaaagagaatccaaaccactgggcaaatgcagctttgagaaactgttccagcatttctcaccaggccaatcgacagtcagtcccatctacaaatgtaaagtgtccttcgggctcagtgccatctacaaatgtaaagtgtccttcgggctctgtccatcctatgaggcatttggaacatggaggcaggagtgtttttaggtttccttccttaccttcgagctgtgtgtgcagggcagggggctccaatgttcccagggctgaggctctgtccttcttcccccagcccagagaaaggctgatttccaacatcctgcaggggctgtggggccagagcccacagacagaggcctgcagtggaggtaattctgcccgaagaccccagactcccacctgctcgtggcccatacactgcccctaaagctcccattcttcccccaggtccagcccagctgccgatgcccaggaagaaaacctctgtgagtgagaggaagaggtgaccagccaggagggagatgggggccccgaagtttccgtagcaatggggaaaggggcgctggctggaaagggtctggggctcagggtgagatcatctcaccccacactgtggggcctcagggacatcgcagcccctccctgcatctcagtggccccatctgggagctgagcaggggctggcaggactcagaggtcccagggaaccttcccaagagacaaaccccttgctctgccccagcagatgctgccgtgaagcacacacagcctgaggatggggtggagatggacactcgggtgagaccccacccctgtcccaggcaccaaaggcctcctggtgccagatctaatcctgcagaacttctctgtcctccttcccccggctctcagcatcgtcacggtggacccctccttgtccagcacgctgcctcccgcctgctgcgacctcactctctcctgctgtcctgggacctcgtgggcctcctcccgggtccccttcctgctcctcatcctctgtttggccgtctggttgttagagctctccccaggcctcaggaggatgaggaataaatgaaccaccccggtcccccaggctccccttcattcattcaaccagcaagtgttcccagggagctcactgtggatggggctccccatgggagctgcagacacagcagggaggaaagccgcccccgcctcctgagctcacctcgtggtgggagacaaaatgcaaataaatgtgccgcctccaggagtgcaacgtgctgtaaggaacataaaccagagaaagggcagagagtgtggggcagtggggccagtctgaatggaaggggagggctgtctgctcagctgtcatctgagaagcctggacagagtggggcacacgatcctctgatggacgagcccctgcaggcagaggaaacaaccctgcaaaggcccccaggcagcagcgagctcttgcaggaaggcccgtgaggctgcagccaaatgggcaacgtcagagtgaggagcagaggccagaaccacagcgagggagcggccagaccctccacggccttagggcgtccctgagattccatcgggaaagggatgtaatcggatcacccggggaacagtgaggaaaattgactccagggggtcaggaggattcaaggacaccccccaccactgtctctctccagcagagcccacacgatgaagacccccaggcagtgacgtatgccgaggtgaaacactccagacctaggagagaaatggcctctcctccttccccactgtctggggaattcctggacacaaaggacagacaggcggaagaggacaggcagatggacactgaggtgagtcctttcctctccaggcccccaggcctcccccacccccaccacgttccttccctctcactctcccccgctgcaggctgctgcatctgaagccccccaggatgtgacctacgcccagctgcacagcttgaccctcagacgggaggcaactgagcctcctccatcccaggaagggccctctccagctgtgcccagcatctacgccactctggccatccactagcccagggggggacgcagaccccacactccatggagtctggaatgcatgggagctgcccccccagtggacaccattggaccccacccagcctggatctaccccaggagactctgggaacttttaggggtcactcaattctgcagtataaataactaatgtctctacaattttgaaataaagcaacagacttctcaataatcaatgaagtagctgagaaaactaagtcagaaagtgcattaaactgaatcacaatgtaaatattacacatcaagcgatgaaactggaaaactacaagccacgaatgaatgaattaggaaagaaaaaaagtaggaaatgaatgatcttggctttcctataagaaatttagggcagggcacggtggctcacgcctgtaattccagcactttgggaggccgaggcgggcagatcacgagttcaggagatcgagaccatcttggccaacatggtgaaaccctgtctctcctaaaaatacaaaaattagctggatgtggtggcagtgcctgtaatcccagctatttgggaggctgaggcaggagaatcgcttgaaccagggagtcagaggtttcagtgagccaagatcgcaccactgctctccagcctggcgacagagggagactccatctcaaattaaaaaaaaaaaaaaaaaagaaagaaaaagagaaaaaagaaatttagaagaataacaagttattccaaatgaaggcgtaagaaagggaataataacaataataagaggagttgttcatgaggaaaaaccaaagcttgaaaattcaacaaagccagtgaagctcattcttgaaaacatgaatcacactcatgaattctaactacaatgaaaaagagaaagaaagagcaggcatgcatttccatatgggagtgagccagcagacagccctacagatcgtacacacgttttccaaaactaacaatggaacaggcggcaaacctatgccaatatactagaaattgcagattaaatagatgaaatattctaaactggagtttacataatgaacataagagtaatcagagaatctgactcattttagatgtgtgtgtgtgtgtatatatatgtgtgtgtgtgtgaaaaacattgactataataaaaataatctcgagttcacgaagcttcattggtgatttcttacaaatattgacacactaatgaaacacacaaacacacccagagcatcacaaatgtttcttgagaatagaaaaagtggcaatgtgcccaggtgcggtggctcacgcctgtaatctcaacacatagggtggcagaggcggcagattacttgaggctgggagttcaagaccagcctggccaacacggcaaaaccccatctctactaaaaatacaaaaattagtcggacatggtggcgcacactgcagtcccagctacttgggaggcagaggcaggagaatcacttgatcccaggagatggaggctgcagtgagctgagatcccgcccctgcgctccagcctggtcaacagagccagactctgtctcaaaaaattaaaaaaaaaaaaagtcatgacatataaaatagaattttccattctataacaggcatattttaaactctacagtttttctgtttcaaaataatatttttttaaattttattttaatgttttactttattttatttggcagtttaaaattctacatatttaggatgtgcaacatggtattttaatatgcctgtgaaatcgctaggtcaagctaattaacatctgtaacatcacgtagttatctttctgttaagagaacatttaaaatccactttcttaccaattttcgcgtatgcaatccattgttagcaactgtagtcaccatactgtacaacagatctcctaaacttactcctcctgtccaactgaagtgcggtatccttcgatgcagctctctgattccaccccagcccagctcccggggaccaccttctactctctacttccatgagttcaactggggcaatccgcacataagtgagatcaggcagcaggtgtcttcccgtgccttctttattccgcgtagcgtgacgtcctctaggctcgtccatgttgtcacaaatgaaacaatttccttcttctagaaggcggaatagtttttcgctgtgtttatactgagcgcttcattttctgtatccattcgcctgctgatggacgcttggccgggttccatgtcttggttatggtggctaaagctgtcatgaacatgggagggcgggcatctcttcaacgtactgattccatttcctttagatacacacccagcagtgaaattgttgaaacacagggtagctctgatcattaacttctgaaaaacatctatagtatttttgtggtcattgtactcatttacattaccactagcggagggcagcggttctattttttctacattctcgctaacacttgttattctactctttttcatagtaaccatcctaacagatgtgaggttatagcttcttaaagtttatatgtatgtaagtatatgcctatatgtatatatgcaaatgtatgtattcatacataaacatccatacgtacatatgtgcagatacgtatgtacatatatatgcatgtgtattgtatgtatatatgtatacacaggtatacacatatatgtgtagaaagtgaaattttgcagtgagatatcacctcacagctgttagattgcctattatcagaatggtgaaagatcagtgttggtgagcatgaggagaaaaaatccttacacaccattggtggacatgtaaattaacacagccattttagaaaacagtatggaagctcctcaaaaaactaaacatgccaccaccatataatccagcaagcccactgctgggtgtataccagaagaaatgaaatcggccacagaagagacgtccacactcctaagctcattgcagcactattcacaattgccaagttacaaaaacaattctatatttttgaaaaaggattcatttctcctgtccctgtagagaaaacgggctcaaattacacattagctgagctctgagtactcactcatgtgtgtatctatgagggtgcatgttcgtgtgtgtttcagtatgtggtttttccattctgtgtactcacccatgtctgtaactatgagggtgcatgttcacgtgtgtgtgtgtgtgtttcagtgtgtggtttttcccatttttcctcccttgaggatatcgcattgtatgttttggattctttgatcttccaattaaattacatcatttagaattgctttcactaagtgtgaaacaataaaaattttttttaattgtggctctggaaataccttcctttccctttcactctgtatcaagatttgtaaattttttaaaatttttgttgttattttaagttctggggcacatgtgcaggatctgcaggtttgttacacaggtaaacatgtgccatggtggtttgctgcacctgtcaacccatcacctaggtattaagcccagcatgcattggctgttgttcctaatcctctccctgtcccaactcaccctcctccaacaggtcccagtgtgtgctgtccccctccctgtgttcatgtgatctcactgttcagctcccacttataagtgagaacatgcagtgtttggttttctgttcctgcattggtttgctgaggataatggcttccagctccatccatgtccctgccaaggacatgatattgttcctttttatggatgcatagtattccatggtgtatatgtatcacattttctttatccagtctatcattgatgggcatttgggttgattccaggtctttgctactatgaatagtgttgcaaaaaacatatgcatgcatgtatctttgtaatagaatgatttatattcctttgggtatatacccagggattgctgagtcaaatggtatttctggttctagatctttgaggaatcaccacaccatcttccacaatggttgaactaattacattcccactaacagtgtaaaagcatttctatttctctgcaacctcaccggcatctgtttctccttgactttttgataatcgcaattccaactggtgtgagatggtatcccattgaggttttgacttgcatttctctaatgaccagtgatgttgagctttgttccatgtttcctggccacatgaatgtcttcttttgacaagtgtctgctcatgccttttgcccacttattaatgttttattcctgtaaatttgtttaagttccttgtggattctggatgttagacctttgtcagatggacagattgcaaaaattgtctcccattctgtagcttgtctgttcgctctgataatggtttctcttgctgtgcagacgctctttagtttaatttgatcccatttgtcaattttagcttttgttgcaattgcttttggtgatttcgtcatgaagtctttgcccatctttgtcctgaattatattaaataaagtctttgtcctgaattatattaaataaagcataagggaaaagatgtagaagggaaagtacatgtaatggttaaggcgtctactgccaatccctccccgttcctcaagatgaagcctgacatgctgggtttaatgtgtgagacaagctgccgacaggtcgtttgcctttgtctttaataatttagattaacacagaaatcttcaccatgaatttctgaaggcctttctttagtatctcctggtgttgaatttgctgttggaaggtccaatcccagtgagcatgcaaatccattggaaataatttgcatttttacaaataaataattttaggattttttttttgtttccaggacagacttccttgtatttttttaatgagttaaaaattatataatataaaaataacatttaaaaacccacaattcaggccgggcacggtggctcatgcctgtaatcccagcactttgggaagccgagacgggcggatcacttgaggtcaggagtttgagaccagcctggtcaacatggcaaaaccccgtctttactaaaaatacaaaaattagccaggcatggtgtcaagcacctgtaatcccagctactcgggaggctgagacaggagaattgcttgaacctgggaggcagaggttgcagtgagcagagattgtgccactacactccagcctgagtgacagagcaagactctgtctcacacaaaaacaaaaacaaaagcaaaaacaacccctcacaattcagcctaggatatgtttattaaatttacatttgtctttttgcttaagattgctttggtattcgtcctctttttggttccatatgaattttaggattgttttttctaattctgtgaaaaaaatgatgttgatattttgatgggaattgcattgaatctaaatattgctttgggaagtgtgatcattttcacaatattgattcttccaatccatgagcatgggatatatttctattttgctgtgtcatctacaatttctttcagcagcattttgttgttcttcttgtagagatctttcacctcctcggctaggtatatacttagatatttttaatttttgcaactgatgtacaagggattgagttttgcagcaacctggatgagctggaggccattattcatgacaccacatccagctaatttttgtattttttgtagagatgcggttttgccatgttgcccaggctggtcttgaactcctgggcccaagtgacccgcccgccttgacctcccaaagtgctgggactgcaggcatgagccacggtgcccggcctatcatagcacttttgatcattgggataattcctcctccttgtcatttttggacacatgcttcccacatgcctcatcttccagagagggtttccaccagggctgtgctgggagttaaggctggaaaaggggagatggttccagctgccagtgccacatgagtctactcagggctgtaaccagcagggaaggtccagtgtgagcctcagactcgcatgtgggacagacgcccatgtgtgacaacgctgcagtgaatctgtttcacacacatggaggaggcggctcagggctgaccatggacctgagtcaatgagcagagatatcccagtgccatccacaaacacaggggagaaggagccacaacttctcactttcatccaaaaccccgacccctccctgtctgtgagggcctggggttctcctctgtctcatacagaggcagaaacctcccccttagtgacccccagactttgcaagtcaccagcagccgctcggctctggcctcttctgcttcttaaggtttcctgcctatgacaggaagtctcatttctcattttcttcatcggaccatggctacatatttcagacacattataagtaggttttcccaatgttaggagcagatgtgggctgttgagcatttaagttgctcaccgtgactgtgcagtccaacaccaggatccactcatgtttcagcccctcaagacttaacccggtctggaaatgtaccatgactgaggccctcccatgacccaggcaccactggcccccaaaaccactcaggaggggggttcatgacaacaggctccaaatgaggaaaccgaggctcagagatgggacttactgcccaaggtcatgcacgcagggatgaaggtgagcaattcagaaaaaattaactccctatcccaccgccaaatcagagctcaagacaagtacttgttcccaaaaccttgaaggcagactgagatgcaggggaatgcccaaggaagcggggctgggggtgggagggaccccgaggaggcaggaatgactcagaggttacttttaagggaaggggagctgaacgctattaaaaaataggaagaaaaaaagaagggaagtctaagaaggaaactggaagaaataaaacccatactccaaagacaaaagaagagtcagcatttctttatttctcctttttttctcattgccaattgcagctcaacttgaatttcacagcccgatgtgagatgcgtctctgctgatctgagcctgtcctgcagcatggacctgcaactttcctgaagcatctccagggctggatgccatggtaaggatcccgcaatgctgtgttgatggacgggctgaaggagggaaggagaccccacggggaggctctgagaagaagaaaaagcccccagtcactctcacttggacaggacagactcagaaaggtgctgtgtcctgtgtcctgacccttgatgagatgaggacagatgaggcaaatcgcagaaaagggtcagggagataccatttctgtatgaaatatctgaagacagcctggtgcctgccccagtcccagccttggggaaatgaaagccaggctcctggagagggcagttccccttcttgtggggctgatgacgggacaacctcgtgatggagaacccaggctcccagtagatttactccatccaggaactgtggtctcgtccatctgcacagccaggggctgtggaggagatgccatgacttccacccgcaaacctctgatctgtcttgatgaaattgaaagagggagaggggagactgtagcctggaaggaatcccacctcacaacttggtcctgattgaatagaagaccccagaggttcacagagatcccaaggtggggaggatctgcccagggttcaggaggcgaatctccctcaggaagctccgtgaccccctccttagtgtcgctcctgtgcctcagtgggatttggagaggatgccttagattagagggtattgttcagtgggatttggagaggatgccttagattagagagtattgttcagtgggatttggaaaagatgccttagattagagggtattgttcagtgggatttggagaggatgccttagattagagggtattgttcagtgggatttggagaggatgccttagattagaggatattgttcagtgggatttggagaggatgccttagattagaaggtattgttcagtgggatttggagaggatgccttagattagagggtattgttcagtgggatttggagaggatgccttagattagaggatattgttcagtgggatttggagaggatgccttagattagagggtattgttcagtgggatttggagaggatgccttagattagaggatattgttcagtgggatttggagaggatgccttagattagagggtattgttcagtgggatttggagaggatgccttagattagagggtattgttcagtgggatttggagaggatgccttagattagaggatattgttcagtgggatttggagaggatgccttagattagaggatattgttcagtgggatttggagaggatgccttagattagagggtattgttcagtgggatttggagaggatgccttagattagaggatattgttcagtgggatttggagaggatgccttagattagaggatattgttcagtgggatttggagaggacgccttagattagaggtattgttcagtgggattaggagaggacaccttagattagagggtattgttcagtgggatttggagaggatgccttagattagagggtattgtgtctttcagcaacaaaaccgtacaaaaaacacctgggcatttcacatcagtggataaagcatatcttgtgccaaatcaggaccaaactgcggtgaaatttagggttcacactacagttaatcacttttgaggaaagcattccaggttggtgcctatctctgtgataaacatctcccttcctggctacaggtaatggattaaagtaacactggccgaacagacactatcttcacttgatgattatactgaaaaatagccataaaattgttccctccaaatccaattccccttttgactttagacaattctctaaagaagatatacaaatggccaacaaacatataaaaaacatgtatatatgcgtatatatacatatatatacacacacacacacacacacacacacacacacacaccatggaatacttcagtcataaaaaggaacaaaataatggcattcgcagcaacctggaggcagttggagaccactattctaagtgaaataactcaggaatggaaaaccatcatcatatgttctcataagtgggagctaagctatgaggatgtaaaggcataagaaggatataatggactctggggacccagggggagcaatgggagggggtgagggataaaagactacgcattgggtacagtgtacactgctcgggtgatgggtgttccaaaatctcaaaaatcaccactaaagaacttatgcatgcaaccaaacaccacctgttcccccaaaactactgaaacttaaaaataaataaatagataaaaataaattcaccacattcaaaatgacaaccgctgaagccccagtgggcgcatgttacagggtgctcttttagtttcggccttccataggcaacttgtgtgtatcagctccattagacccctgccttcctgcaaggacagacggctctctgtatcccagggttctcgccttggtgtaccggaagaaccggatcacatgagggcttggagaatgagtgcaaggtttgattgagtggaaacagctctcagcagaagggcgatggttttctcctggagtcgggcccctggcggcccgggatcctctctgactgtcccagccaagctccatgtcgttctgccagtcggtggcctgtggtgtgctggtgcccgtccttgcgttcctctcgacatccagccatctgtgtgttcctgcactgacgtgctcctctcagccgccagtgtcttcttcttccgctgatctgcggacgtccagctgcttgtgtgtctgcctgctcaggtctcggagttgttttttttgtttgtttgtttgttttttaattatactttaagttttagggtacatgtgcacaatgtgcaggttagttacatatgtatacatgtgccatgttggtgtgctgcacccattatctcgtcatttaacgttaggtatatctcctaaagctatccctccccacccgccaccccacaacaggccccggtgtgtgatgttccccttcctgtgtccatgtgttctcattgttcaattcccacctatgagtgagaacatgcggtgtttggtttttcgtccttgcaatagtttgctgagaatgatggtttccaatttcatccatgtccctacaaaggacatgaactcatcattttttatggctgcatagtattccatggtgtatatgtgccacattttcttaatccagtctatcatcgttggacatttggcttggttccaagtgtttgctattgtgaatagtgccacaatatagttcaaccattgtggaagtcaatgtggtgattcctcagggatctagaactagaaataccatatattaatcacctcagttagttattatttctgtgtgcatgtgtgtgtgcagtgaaaatacttaggatctactctcagctaattttaagtgtacaatacagtattgttacctatagctttcattccatacattagctttccagaattattcatttcggagaattgaaactttgtatcctttgaccaacatcttatttttcccatttccagcccctgctaaccaccattctactctcagcttctatgaatttcactatttagattccacaattatgtgagattataagatatttatctattaagagttggattcatttcacttagcataatgtcatttgggtccaatcctgctatcacaaatgatctgattttcttctttttcaagactgaataaaactttatatttattatactatgttatcttaatccattcctccatcaatgggcatttatgtcatttatttacctcggctattgtgaatactggtgcagtgaattcatcagtgtggatatatctcttcaagatcttgatttgagttcttttggataattatccggaagttgaaatctggtgtcttatagttcaatttttaacattttgaggaaatgtgataccgtttctataatggatggatcggtttctgttaacttaaatcagggtattgtctttctcactcagaccgctgctggaatccttggaaattcttcactcctttacttttttagctttacttttatcacttcacagatattgagacccagagacctgattctcagccagctggtcttagccaacaacctggttcttttctctaaacgaatcccccagacaatggcagcttttggaatgaaatccttcctggacgaggctggatgaaacttgtcttctatctatacacagagtggccagaggggtttccctcagcaccgcctgtctccccagtggcttccaggccatgaagcttcaacctcagtatctctaggaggatggaactccgaattaggtccacaaagtgcattgttttctgctgccccctctgctggatcttgcaaattgtggcatatacccatattgcaatgcatgtaactggcccaatgaagagcaaaaacgtgagtatggaataaatgtataggtactctcctcacccattctaggatgattgctattcttagcaaatgcagtcattttctcccttgtggatggtatgtctttggccctcatggactacaccagcagctccatgatcctcttcttatatagacacaagcagacagtccaatgcattcgcagccacggcctctccccctgaaaatctcatgaaactagagccacacacaccatcctcgtcctggtgagcatgtttgtctcctctcatggtctagctggtattttatcactgtgggtaacctggattcagaacccaagccattggctgagaagcatctctttcctggtgtctgcaggattcccgacattcagcccctttgggttcattgtcagtgatgcccgcgtctcacagttctgcactgtctgctggacaaggaagacaaatgctccaagtgtggtctctgggctctaagttccctctagacaattgcgtcctttatttaatcacttctccccacaatatctgttggatcatacattatgccagttaatacgcaaggactttgggactcagtattgaataaaaatgataataaccatagcctcatattgcttcttaggctctcaaaaaatgaacgcagtgtaaaaattacccagatgtatgtcagttcctcagaagattaaacacagaattaccatatgacccggcaatttctgggaaaattaaagcaaggatttaaaaggatgctcatatactcatgttcataacagcgttattcacattaacaaaaaagtagaaaaaacccaaagatggataaatggataaacaaatgttatagaaactaggaaatactgttcagtctctcaaagaaatgaaattgtgactgacatacactataatatggagagccttgaagatattatgctaagtgaaataagccagtctcataaaggacaaatattgcaaatattgctaagattctatctatatgagctacctgtcaaactcacagactcaggaagtagaatcacggttaacagaggcttgggggcctggaaactgagagttggtgtttactgaatataaagcttcaattggaaagataaaatactttggggatggtgatggcgatggttgcatagcaatgtcaaaccacttcacaatactgcactgtagagttagaaagagtaaatatggtaaattttatttcatttgtttttttttttactataatttaaaatgagaaagagtagtaaaaacacacaaaagagaggagctaacagataaaaagtgcactaagttagccaagccagagctttaagaaccattatcacttctctctctctttcaccccacaatcaacattaatcaggtccaaccatgtgttctgccttcttagcactgctcacgtgtgtcccctcctctcttatttccatgcactctggcccagctgggcttcttctctctttgcctgtgatttgctctgttgtcctccctggctcagacgtgcagtcccagtctctcctgatgctttgtccccacattgagggcactgctgtttccccacaggccactcctttttttttttttttcttgagacagagtcttactctgtcacctaggctggagtgcaatggcacgatctcggctcactgcaacctccacctcccaggttcaagtgattctcctgcctcagcctcctgagtagctgggattacaggtatacaccaccacacccagataattttttgtattttttttagagacagggtttcactgtgttggccaggctggtctcgaactcctaacctcgtaatcctcccacctcagcctcccaaagtgctgaactcctaatacaccctctgtcctttcccaccttgtctgtgccctggaggctgactctatggattgcatcatcagtgtctccttgcctttagcgtctgattgagttcaaccatggaggcactgtcaggagagcagagggtgagaggagagagaggccggggaatcaattcccacacatatgccctgccaggctgtggtttgtcagcaactgtgctcctctacccatgacatcagctcccgcaaggcacctcccatctcccacacagggctctctccaccccttgacctcccatcctgggagtggcagtggcttcctggggtgcttcatccctctcatttgcccacacctttatacacttctttttcttttttcttttctttttttttttttttttttgacggagtctcactctgtcaccaggctggagggcagtggcaccatctcagctcactgcaagctctgcctcccaggttcacgccattctcctgcctcagcctccaaagtagctgggattacaggcgcccggctaattttttgtatttttagtagagacagggtttcacc[140 bp omitted]gggtacatgtgtaggtttgttaccaaggaatattgtgtggcattgaggtttggagtaagactgagcccctcacccaggtagggagcatggtacccaacaggtagtttttcagccccatccccctcctctccaccctcagtggtccccagcgtctactgttgccatctttatgggaagatgtgtacctaatatttagctcccacttataagtgagaatatgtggtatttggtgttcagtttctacattagtttacgtaagataatggcctccagctgcatccatgttgctgcaaaggacatgagttcattcttttttatggctgtgtagtcttccatggtgtatatggaccacattttctttatttggttcactgttgatgggcaacgaggttgattccatgtcttttctattgtcaatagtgctgcaatgatcatccaagtgtgtgtgttcttgactagaatgatttattttccctggatatatacccagtaataggactcctgggtcaaatggtagttccattcctagttatttgagatatcctcaaactgctctccacggcgactgttagtcctagctctttgagaagccaaggtgggaggattgcttgaggccaggagtttggggccattcgattctctaactactacccctgctgtatagaaatgtcattgatatggatttgtttttattttcttataaatcctaatggactttgaattttctatttagagaatcttactacctacaagtaatgaaaaaatctctctagccctcatatatcttatttttagttttttacttttactgatattattacatcagttaggacacctcagtagaaaatggaataaaagtggaaagaccattaagcctcgttttgttcatattttagtggaaattgatctaagcttcatcattaaatataatatttgctattgatttgttgctgggcatcctttaacatgtttatgatgtttcattctattcctaattcattaagattttttaaaccataaataagtgcagattatagtaatattgagcaaatattttcttctcacctccaatgggccaccctctagaccccctaccctcaccctcatctcccctacctcaccgcgggtctctgtcctcagacccctgctgcaggggacccctggaggtgacatatgctcagctggaccaccaggccttcacttggaggacagcccaggctgtgtccccagagtccatggtgcccatggctgagtctagcatgtacacagccctcgccaggcactgactccgggaccactgccccctgcgcctgaggaagtcatgcttggaaaagcctcaagaagccatctggagggcttccccttggaatcatcctggtctgcaaaaccagtcaactgttctggagataagaggtagagcccaaagttctctagtcagcatctagaaagttcattaaccaggtgattccttccacaactgaccagcacctcaaagaggtggcattgcagctacttctagaaacccagctgcaatcacctggctgtttccagacacctagttccagtcacctggttgtttccagtgatccagctgctgtcacttctctgtttcaagacacccagctccagtctcctggctgtttgctgagtctcagctatagccatcccagctgattccattaacaatgttgcatccccctgcagtttccaaatgtcttctgtaaatccccccagctgccccagcaatcgtctactcagctgatcctgaacattctcctagagtttagttgttgaccttgagaatgagctatacatatggatctgagagctgagaccagtcctctgggtcatgctttacttcatgcaccaatgaatagtttaaagacctcacatctggcagtcctgtgtcatgttctggggtgtatagatcacttggacccaatctctgccttcatgttgttcaaggttacatggggttaacaagagctacaaaggaggtgtcagtatttttttaaggatttcattggcagtgattgcatatattcaagatgcacaaggtgataatttgatatacatatacattgtgaaataatagccacggtcaaatgaatcagcgcatccatcaccagctacgctgtacataagatcccctgaacttgctcatcttaggcctccaagatggagcatatgatcagggatcaattaaggtgtctgagcggatgcatggatgggtgaagacagagagctaatcccacttatgcacttacacacatatgcacatgtactcacacattcacacatgcacacacatgcacaaacctgaacgcactcacacatgtcaggagacctctgaatcctctgtgcgctgggacttggttgtctccacccctcttagaaagttagatgctctccctattcagattaaaacggaaaattacttgagaaccactagggggagacagtacctcatttgaattaatttttgtgcacatttaaaataaacaataacacacttaccatgggcatgcctttggccggattgcaaaggtaaacatatatcaaagcatctcatggtacccaataaatatatacaattattatttttcaattaaaatatcgtaataaaataacagaaaagaaacctgcatacttgtaacagagtggatttttaaatgtcgttttatacaagaaaaagaatattttttaaaaaactcaacaataactcaatcagcttatcctatggagcaattactagttgaatactatgcaaacatcaacacattcactagtcttacatatgccccacagcttgtcctattttttccccacttgtggggattttgatagttgttgagtatgtctaatccaattatacattccagagcaaggaataaagccacaggatgcatttggtggccaagaaaattcaacaggagacaaatctgagctaaaggttcattgactacctgacctccataagcttctaatctgactggagggtcaccatgatgttttgggtcttctgaagttagtgttagctcagagccagtgtctagttgcacccaaaatatctgatcatttcctttacccagtacacagctaccatgataaaggccataggtccatttaagggaagctgagataaatataattgtttaactttttatagtatataccggggcagcgccttcaaggatacctggtcttccctttaattcaaggggttctgggtctataaactggtgaaattctagtaattgattaagagactgtaactgtctattttatgattttaattagattcttgttctctttgccaagaaatgttctgcttatacaaatcaagtaagaatgaagtaagtttcctatctatttcacgtcttagaacgctgcggtcaactagacaacactaaagggctgcatgagacagtctattctgattactgccttgattctgctttccattatgatcaccacacccagttctatgataaccacacccaattcaacacaccagattctcacctttgtcgactgacttctgacacttgagtcctgccactctaggatccaactactccccttacatttaggtttctcggttcagtggcagcagttcccactggaagttctggcctctcctaatacaccctctgtcctttcccaccttgtctctgccctggaggctgactctatggattgcatcaccaacatcttcttgtgtctagtgtctggttgagttcagccatgggaggcactgtcaggagagcagagggtgagaggagagagaggccggggaatctattcccacacgtacgccctgccaggcaataaactgtgctcctctacccatgacataagctcccacgaggcacctcccatctcccagctcagtcctcaaggtgactttccagagacctagttacattcggctgttactaaagagtcagctacagtcatctagctgtttccagtgaccacccccaatcccccatagctgcctgcctgtttgcagagacccagctacatgcacctagctgtttctagagacccggctacatccacctggctgtttccagagacccggctacatccacctggctgtttccagagacccggctacatccacctgactgtttccagagacccggctacatccgctggctgtttctagagacccggctacatccacccagctgatttcattatcactgacgcagtccccagctgctcctatgtctcctggaaatccccaattgccccagagactttgttgtaattttctgttcagctgactctagggatcttcctggagcttaattgctggccttaagaatgggccatatttatgcaactgagagcagagcccagttctctgggccatgctttcctttgtacatcaacaaataatcctaaagacctaaagtctggcaatcccacgccaggtcctagggtgcacaggtcacctgcatccagtctttgccttcacagttattcaaagctgagcagggaaaaaggagagccacagagaagttcagtgttttcctttttatctttttaaaaaatccttttttatccttaaaatgatttaatcaaccaagattgtatatattgaggtgtacaacatgatgatttgatatacgtatacattgtgtaatgattgccacaatcaaattagcacactcaggacaaccagtgccctaaatagatcccctggatttgtacacgttatgccttaaagttggtgccagagttccatttatttatttttatccatatataatagttgtatataggtttggggtacttatgatattttgatacttgtatgcaatgggtaataataaaatcagggtaattagaatatccatcacctcaaatatttatcttttctttttgttggggagcattacaattcttttattctagttgttttgaaatacacaatatattattgttaactatacttcccctactgtactgtcaaatactcagttatttctcctatccagctgtatttctatactccgtaactaacatctccttatctcccaccctttccagctctagtaaccaccagtctacacattttttttttttgagacagagtcttgctgtgtcacccaggatggaatgcagtggcgtgatcttggctcactgcaacctttgcctcctgggttcaagagattcgcctgcctcagcctcctgagtagctgggattacagatgcatgccaccacgccaggctaaagacagggtttcaccatgttggccaggatggtctcgaactcttgacctcaagtgatccacccgcctcagcctcccaaagtgctgggattacaggcatgagccaccacgcccggccttttttttttcttttgagacaaggtattgctctgttgcccaagctggaatgcagtgacacaatcatggctcactgcagcctcaaccctccagggctcaagcgatcctcctgcctcagactcccgagtagctaggaccacagtgcacaccaccacgcccaactaatttttgtatgtttcgtagagaaggggttttgccacattggccaggctggtctggaactcctgacctcaagtgaaccacctgccttggcctcccaaatcactgggattacaggcacaagccaccacacctggccaaccagtctactctctctgtttaggaatccacttctttagctcccacgtatgagtgagaacattcgagatttgtctttctgttcctggcttatttcactgaccataatgacctccagttccaactatgttgctgtaaatgtcaggatttcattcttttttatggatgacccctcttccattgtgtatacataccacattttctttacccttttatccactgatggacacttaggttgattccgtatgctgacttgtgaagagtgctgcaataaacacacgggtgcagggactcttgtgatgtcctgagatttttttcctttgcatgaatattcagtagtgaactcactggattttacgataattgcagtttcagtatcttgaggaatctccgtgttttttttttttttctttttttgagacagagtctcactgtcgcccaggctggagtgcagtggcgtgatctcggctcactgtaggctctgcccctcggggttcacaccattctcctgcctcagcctcccgagtagctgggactacaggtgcctgccacctcgcctggctaattttttgtatttttagtagagacagg[135 bp omitted]actaatttatattcccaccaacagtgtctaagagttattttgtcagcacatcctcaccagcatgtttttattttattttattgatctatttatttatttgtttgtttgtttagatggagtctcactctgtcgcccaggctggagtgcagtggtgccatctcagctcactgcaacctccagctcctgggtgcaagcgattctcttccctcagcctcccgagtagcaggagcctcctgattacaggcgggcgccaccacgcccggctaatttttgtctttttagtagagacggggtttcaacatgttggccaggctggtctcaaactcctgacctcgtgatccgcctgcctcggcctcccaaagtgctgagattacaggcgtgaaccactgtgcccagcccagcatgtttttatatgtttctttgataatagacattttaactgaaataagatgatactcattgtagtttcgatttgatgccagtgatgattgtgggtttttgtttgtttgtttgtgttttgagatgaagtctcgctctgtcacccagattggagtgcagtagtgtgatcttggctcactgcaacctctgcctactgggttcaagtgagcctcctgcctcagcctcctcagtagatgggactacaggtgtatgccaccacgcccagctgtttttttttctttttttgtatttttggtagagatgaggtttcaccatgttgcccaggctggtctcaaactcctgggttcaagtgatccacctgctttggcctcccaaagtgctgggattacaggtgtgagccaccgcgcttggccgatgattagtgttttatatagctgttggccatctgtacattttcttttgagaagcaactattcagatgctttgcatacttgttaatggaattatctggggattttttgttgaggtgtgtttcttctaggcctaatttgttgatagttttaatgatgaagggatgttgaattttgtcaaatgtttttttaacatctattgtgatgatcatataatttttttttttttttttagacagagggtctctccttcacccaggcaggagtgcagtggcgcgatcttggctcactgcaacttccacctcctgggttcaagagattctcctgtctcagcctcccgagtagctggactaccggtgcacaccaccacacccagttaatattttgcatttttgagagagatggggtttcatcatgttggccaggctgatctcgatctcctgacctcaagtgatccacccatctcaatctcccaaagtgctgggattgcaggcatgaaccaccgcgcctgcccatgattatatgttttttgttcttccttctgttgacatgagatatcatatctattgatttgagaatgttgaaatatcctcccttctggctgctgtgtggactgcgagctctcctaccctccatggtcttccaatcccactgtccccaggccaactgctcccagactatgcagtagtctcatgtgcatggagcagttgcaattgatcctggtggtgacagaggggttggtgtttcaggcatggcacagtcagaggaggtcccaaggagagaccaagaggtaaacttaagtagagctgcaccccttccttggcatctgtagaaccctggataaaatcaaatacgccaacccaaatgcccatcaatgatagactggataaagaaaatgtggcacatatacaccatggaatactatgcagccacaaaaaaggatgagttcatgtcctttgcagggacacagatgaagctgaaaaccatcattctctgcaaactaacacgagaacagaaaaccaaacatcacgtgtcctcactcataggtgggagttgagcaatgagaacacatggacacgaagaggggaaaatcacacaccggcacctgtcacgggctggggggctgggggagggatagcattagaagaaatacctaatatagacaacaggttgatgggtgcagcaaaataccatggcacgtgtatacctatgtaacaaacctgcacgttctgcacatgtatcccagaacttgaagtataataataaaaaaaaagaaaacgaaacaatgaaacatgggttcttatgaatcacagaacacccgtgaccccaagttaagatggaaatttatgattcattccaactaggtcctgttttcagtatctcacaaaagcttgactctagagtgaaatatacttggaaatgaatgaacgactcttgtggtctttttacttcttgtaaggctttaggatccacccgtttgaatacctatgaccaggacctcctgcaatgcttctctctccacctccaggcatcccttcattcagataataccaattcatcatcaccatctgacctctccttcagcttcttcaccaccctccatctcaattgctttctgtttttcttctttattttttgaacttcaacttttattttagatacgaggatacatgctcaggtttgctacatggaactattgcacccaggtggtgagtgcaggacccagtgggtatttcttttatcctgtcctattgcgttaaatctttccttcccgggactggtcctatctctaaactttttgcgtagtgattttatcaacttaatttttgctaggatgctagattttctaggaggggaggtaatttgaaatgaagtctgggttactgtgaatccagtatatctgctttgctcgcctttatctcttgtgtcctgggatggccacaggttgacatgtttaaatgtttcttaagtgaggatggataa[140 bp omitted]atggtgaaaccccatctctactaaaaatacaaaagttagccgggtgtggtggcagctgcctgtaatctcagctctcagctactcgggaggctgagttaggagaattgtttgaacccaggaggccgaggttgcagtaagccaagattgcaccactgcactccagcctggatgacagagtgtcaccctgtcacaaaaaaaaaaaaaaaaaagaagcaaaatacaagaagtccaggactggtaaaggcaaggcatgttgagcggttagaaaaggggtgatgacatcgaaaaacctcctggcatttcccagtccttgcctagcacaggttactctgaaagcaggacttaagacaaggatatgagcgcaggtaactgatttgggaaccaagtttaagggaatagggttcccttatgaaagagagaaggagaggaattcctgaaatcagcatgcattgcggacaccactacagcaggtaatatggacaggtccacaccaggatctctgataatgtgcagaccatcatccagaacttcccgccaaaacaggagatactcgccaatatgtgtatggctttctagcccccatttctgggagtttctttttccccagccactgtcagacgcatcaagctttggctgaaatagcttccaataaggtccttacacacaaatgtggagagacacatggaaatcctcgaaatgagatactgtcccgtgattctgagagtgacccaaaaggatacggaatgaggtactaaaagcaggtgcttggaaacctgagggcagtggtgttcatgcgtttcccggcactttgactttcagcctcctgcaagcctctccttctttgccttcctgaccgttagatacaattaatttggggtttgttttttctgcttcctctttcccctcccaccctatgtttcagttctaaagttagaaggtcctctcatccttttaagaagaacagagacagaaaatggttagtcaccatctaggacagactacaattccagatcattgcaggacgtgcccactcaaatggatgattattgagagctggccacctgaagtgttttacacaggcagtgatctaagggttgaagctatctggcctttttgcttgcttgttatgtatttatggcttttttccttttcaaaataattttactaaatatttaattcaccaactatatatatttatggggtacaatgtgttataaatgtatacactgtggaatgatggaatcaagacagttaacatgtccatcactccgcatactaacatctgtgaaaacatttaaaatctatgcttggctgggcgtggtggctcatgcctgtaaccccagcaactttgagaggctgagatgggcggatcaccagaggtcaggagttcgagaccggcctggccaacatggtgaaaccccatctctattaaaaatacaaaaattagctgtgagtggtggcgggtgcctgtaatcccagctacacaggaggctaaagcaggagagtctcctgaacccaggaggcggaggttgcagtgagctgagatcacaccacagcactctagcctgggcgacagagtgagactgcatctcagaaaagaaaaaatatatatatatattttggagctacatcgtgctagcgctgcagagaatgagttttgttttgcgacacagtttttagatgtctaccgggctctggtggagatggaatgtttggcctcaagtgggcaggtcccatgggacatgagtagccgaccatgacctggctgcgtactggcccaccaagcattcgactggcgtgcccagccactctccgtcatcgcagagaagtgctctatgtgagatttggttaaaggagtccctgaaggcctgtgggaggcagaatagtgacctcccagagatgtccacctcctgaggcccagaccctgtgagttggggaagcttatgtggcaaaagggactttgcagatgtgattaagtcaaggatcttgggttggggagattacccaggtgggcctgatgtaatcacaaggggctgagtaagtgaaagaggaagacaggagggtcagagtgagagaaggaggtgagtgcatggaagcagggggcagataacgggactggtggctttgaggttggagggaatggagaggcaggaatgcgggagcctgcagaggcttgaacaggcgagggaacagattctccttggagcctccaggaggacacggctctgatagcagcttcattttagcccagggagacccattttggacttgtgacctccgggacggtaagtcaataaacctacattatgtgaagccactaagcttgtggtgatttgttatggcagcaaaaggaagctttatggttcatctgtaccctgaaaatgcaggtttttggttttttttttttttcacttgttcaatgatgtacccccagtgtcaggcgctttgcaaacacacgatacatacgggttgatgtttggtcaagagaggaattaagaccaggcagacagcaggctgggatcagagagaccccatttctgtctgaaatgtctgcagagaacctggtgcctgcctcagccctagctctggggaaatgaaagccaggctggggttcaaatgagggcagtttcccttcctgtgggctgctgatggaacaaccccatgacgagaaggacccagcctccaagcggccacaccctgtgtgtctctttgtcctgccggcactgaggactcatccatctgcacagctggggcccctgggaggagacgccatgatccccaccttcacggctctgctctgcctcggtgagatttaaagagggggaggggagacccgagtcttggaggaaatttgcctcac[187 bp omitted]gttgcaggcgcctgtggtcccagccactcgggaggctgaggcaggagaatggcgtgaacccgggaggcggagcttgcagtgagccaagatcgcaccaccgcactccagcctgggtgacagcgagactccgtctcaaaaaaaaaaaaaaaaaaaaatctcagggtaaagagaggacctgctcaggcttccggggcaaatccctcacagggaactctcttccagggctgagtctgggccccaggacccacatgcaggcaggtgagtctgtccccagctgtcccaggtccctcctcctcactgggacaaggggccacccatgggcagctgggggaggagacagcagttctgggtgactgatgaggatgacgggggggtcctggggctgagagctgggatctgagggctgaggaaggtcttgggatccagcctctgattttcttccagggcccctccccaaacccaccctctgggctgagccaggctctgtgatcagctgggggaactctgtgaccatctggtgtcaggggaccctggaggctcgggagtaccgtctggataaagaggaaagcccagcaccctgggacagacagaacccactggagcccaagaacaaggccagattctccatcccatccatgacagaggactatgcagggagataccgctgttactatcgcagccctgtaggctggtcacagcccagtgaccccctggagctggtgatgacaggtgagaggacactcaggggtcccagccccaggctctgccctcaggaagggggtcagctctcaggggcatctccctctcacagcccagccctggggatgatgtgggaggtgggagccccatttaacacggtgcctccttctctcctaggagcctacagtaaacccaccctttcagccctgccgagtcctcttgtgacctcaggaaagagcgtgaccctgctgtgtcagtcacggagcccaatggacacttttcttctgatcaaggagcgggcagcccatcccctactgcatctgagatcagagcacggagctcagcagcaccaggctgaattccccatgagtcctgtgacctcagtgcacggggggacctacaggtgcttcagctcacacggcttctcccactacctgctgtcacaccccagtgaccccctggagctcatagtctcaggtgaggctcctgaccctgtcctctctgagctcagtggctccgttcatgccctgctgccaggagagctctgggcagggatggagggagaggggctcagccagtgggggactcagccctcagaggggaggaggacaacaggggccctcccaggcatgcccatgctcttctccctcacctagggtccagaaggtgccaggtggacagagaaatggtccttgggaagctgcagggcagatatagggagaggttcaatttgatgtggagacccaagggcaaccccagactctcaccctcctcttgtccttctacccaggatccttggagggtcccaggccctcacccacaaggtccgtctcaacagctggtgagtctcagaggcctctgtccagagagtttccaaagcccgaggcctgtctcaagacatgctcagtggatctaagtcctcgttccaattctcagctgggcttgcttccacgggtgtgggagtcgggcagcgacttgggaggcaccacaggctcccaaggccctgaggctgggctggtgaggggtgagggggtcaaggctgaaggagatgttgcggggagaagccgagctgatgtggggagcagggcagccccagccctcacatccctgttctaacccagcaggccctgaggaccagcccctcatgcctacagggtcagtcccccacagtggtgagtgaggggctctgagtgggaggtgggcagggtctaggggagccaagggtgggttctgtcctaggttaaggctcctctggaggtggtgatgtggacaggcccctcccctgcatgggcctcagtttctccaagtgtaaaggagagaggcctgcgggtgggaaagttcctttcagctctgactcccagctgtgccctcctgggagaggaggcctcccagggaacctcccagacccgattccgcaggggcctgtccggtcccacctgcagcagagacggtgacctggggcaggggaggggagcagggcggtggttcaagacagtcaggctctttccctgcaactctggggcttggctctggtgcaggaacaagggctgcagctcagactcccgggtttccttcccagctctgccgcttcctggctggaggggtctggggcaggcgattcccctctctgagcctcagtttgtgcatctgtgaaatgggtggagagagggtggcaatctcaggttgcacaactgctgtgagggttggaggtaatgaaagaaagacccagcacacacagtaggtgcacacacagtaggtgtgcacatcaatgacatcatccccattcctgatgtcatcacgcccaaggtctgagaaggcactgggaggtactgatcggggtcttggtggtctccatcctgcttctctccctcctcctcttcctcctcctccaacactggcgtcagggaaaacacaggacattgggtaagtaggaaattgggggacccgtgggctgatggagggtgggctcagggcaccagccaaagggactccagataggagaggtcatcttagaaactctgctccagaaattcccagtgagaaaatctagaaagaagaaaatgaatgagggagtaatggaagtgctttattctttcggtttttctaaacttagaaagtatttaaaacatccttgcaagtgtattttcaggtttcctttcctcttgacttgcatgtgcaaggcaggtggttctaacgttcccagagctgagactctgtccatcttcccccagcccagagacaggctgatttccaacgtcctccaggggctgccgagccagagcccaaggacgggggcctacagaggaggtaattctgcccaaagacctcagactcccacccatcccaacagccacctcactgtccccttacactcccgtatcctcccccaggtccagcccagctgctgacgtccagggagaaaacttctgtgagtgagaggcagagaaggtgcacctggggtggagctgggggtcccaaaatttcaatagcaatgggggcaggagcacaggctaggattggtcagggactcagggagaagtggtctgaacccacattgtgggacctcggggacatcacagcccctccctgcgttgcagtggcactaatgggaacagggcagggaccagcaggaatgagaggtcccagggaaccttcccaggagatgaaccccttgctctaccccagcaggtgctgccgtgaagaacacacagcctgaggacggggtggaaatggacactcgggtgagaacccgcccctgtccccggcaccaaaggcctcctggtgccagatctaatcctgcaggacttctctgtcctccttcccccggctctcagcatcgtcacggtggacccctccttgtccagcacgctgcctcctgcctgctgggacctcactctctcctgctgtcctgggacctcatgggcctcctcccgggtccccttcctgctcctcatcctctgtttggccatctggttgttagagagctccccaggcctcaggaggatgacgaataaatgaaccactccagtcccctgggctccccttcattcattcatctagtgagtgttcccagggagctcactgtggatggggctccccatgggagctgcagacacagcagggagcaaagccgcccccgcctcctgagctcacctcgtggtgggagacaaaatgcaaataaatgcatcgtgtccaggagtgcaacgtgctgtaaggaacataaaccaggtaaagggcagagagtgtggggcagtggggccagtctgaatggaaagggagggctgtctgctcagctgtcatctgagaagcctggacggagagggccacgtgatcctctaatggacgagcccctgcaggcagaggaaacagccgtgcaaaggccccgaggcagcagcgagctcttgcaggaaggccgcgtgaggctgcagccaaatgggcaaggtcagagtgaggagcagagaccagaaccacagggagggagcggccagaccctccacggccttagggcatccctgagattccgtcaggaaagggatgtaatcggatcaccctgggaacagtggggaaaattgactccagggagtcaggaggattcaaggacaccccccaccactgtctctctccagcagagcccacacgatgaagacccccaggcagtgacgtatgccaaggtgaaacactccagacctaggagagaaatggcctctcctccctccccactgtctggggaattcctggacacaaaggacagacaggcagaagaggacagacagatggacactgaggtgagtcctttcctctccaggcccccaggcctcccccacccccaccacgttccttccctctcactctcccccgctgcaggctgctgcatctgaagccccccaggatgtgacctacgcccggctgcacagctttaccctcagacagaaggcaactgagcctcctccatcccaggaaggggcctctccagctgagcccagtgtctatgccactctggccatccactaatccaggggggacccagaccccacaagccatggagactcaggaccccagaaggcatggaagctgcctccagtagacatcactgaaccccagccagcccagacccctgacacagaccactagaagattccgggaacgttgggagtcacctgattctgcaaagataaataatatccctgcattatcaaaataaagtagcagacctctcaattcacaatgagttaactgataaaacaaaacagaagtcagacaatgttttaaattgaatgatcatgtaaatattacacatcaaaccaatgacatgggaaaatgggagcttctaatgaggacaaacaaaaaatagagaaaaattaataaagtcaaaatgtttattcttgaaaacattaatgatacatgaatcttggccacaatgagaaaaataaaaatgaaaaaagagcaggcatccatttccatacaggaacaaaataggaggcagcactacagaccctacacacagctttacagaggtgaaagaaaactgtcagcaattctatgctgacataacagaaaatgtagatgagatagatgaaatacgaaaaattacagtttacttaatgaacataaggataaatagaaaaactgaatcatcatacataaacatatataaaatgcattgatcctgtaatcaaaaatgttcccacaaagtaaatgccacttcagcaaggtttgttggtggttttttcaaactcttatgcactcatgaaacacacagacacacacacacacaaacttgcataaattttccctgagaatattttgtatatatttacacaaatacatttgatcagactaggaacaagttgataccaaaacctgaaaaggaaactacagaatgggaaagtcatagaagatctctcacagaaatataaatcccttaacaaatattaacaagtaagattcatgtctctataaaatagacagtatatcatgaccacactggttttttgttatcctttgattttgtttatgaaaagcaaggatagcttaattttcaaaaactcaatcaatgtaattcagtattttaacaaaaggaatgaaaaattatcatctcaatagacaaagcttttgtctgagcaccttttcatatagctgctgaccatttgtatgtcttcttttgagaaatgcctgttcagctactttgcccatgtttcaagtagtttttggtttcttgctgttgctttgttttagttccttacatatttttgcatattaaccctttatcaggtatacagcttgcaactattttctcccatttctgagttgtctcttcattctgtttgcagaagctgtttagaagccacaccttttgtctatttttgcttttgttgcttgtgttttcagggccatatccaaaaaaaccttgcccggaccaacgtcttgaagcttttctcccacccatttttgtatatgggataagggttcaatttcattcttcttcatatgaatatccccaggatgtgtcctatgcccagctgcacagcttaccctcaaacagaaaataatgaagccttcttcctcccaggaaaggggacgttcagctgagccgagtgtgtatactgctctggccatccactagcccagggaggacccagacctccacactccatggagactcagttctcctaggaccatttattcaaaaggactgccctctcttgttcttggaaactttgttgaggatcaattcaccataaatatgtgtgtttccttctttgctttcatccctgttgcactgatcactgtacctgtttctattccagttccatgatgtcttcctggctgtagctttgtaggatatttggggattccatagtgtgatatccccttcttccctttgctcaagattgttttggctatttggggtccttttgtagtcccattcaaattttaggattgtttttctatttctgtggaaaacgaccttggaattttgttaggaattgcattgagtctgcaggtatgaacttttttttaaagttccagggcacatgtacaggacctgcagctttgttacataggtaggcttgtgccatggtggtttgctgcacctatcaacccattacctagttattaagcccagcatgcattagctctttttcctgatgctctccctcccttcatcatccgccctcccactacaagccccagtgtgtgttgttcccctccctgtgtccatgtgttctcattgttatacgaacattttaacaatgttaattcttgcagaccatgaacataagctaccttcccatttatatgcgtcttgttcaatttcattcatcaatgttataaagattttagtgcagagatattaaacctccttggttaaatttaattctaagtaattttttagctattataagtgtaatttttctttcgatttctttctggatagtttgtttttagtatatagagatgctaccaatttctgcatgttgattttgtatcctgcaactctactaaattcgtggatcagttctaaaagttgtttggttgagtctttagagatttttatatataaaatcatgtcagcaaacagagacaatatcactttttatctgatttgggtgcttttgtgtatttttattgcctaattgctgtgtctaggacttctattactatgctgaatagaagaagtgagagcatatacttttgagcaaggattcttccatcctcctcctacagaaagggcaggttctaattgcactctggctgaactattagcacttctcatgcacttgtgtgctcagccctcagtcagcctcattggaaagggtccaactgaggaaggcaccagatgtatttgctgctaagtcctggccacagacagtggatgacagatgattatttaaataaagattagctttcctttcaaagttggagtgctaacccacccaatgtccctaaggcttcagggcaggaccatggaaagaggaggaggaaggttctgagaactagacaaggggcactgaggaggcagaaatgaatcaagtgctgtatccagggagatgtggaggagactgttagaaaatagtaacaaaaaaagggaagcccaagcagagaattgtttggtagaaagaatacccacgacccagggtcagtggaggagttatgttttcttcccctatttccctgcatttctgcactatgcacagtgatatcgctgtcactttctcagccctgcaggcttgtcagaacccagtgaccgcctggaactggtggtgacagatgagaggacactcagggatcccagccccaggcactgcattcaggaaggggttcagctctcagggggtgtctcccttctcacagcccagccctggggtatgatgtggaaggtgtgagccccatttaacatggtgcttccttctgtcctaggattctacagcaaatccaccctctcagctcagcccagccctgtcctgacctcaggaggtaaggtgacaccattatgtccttcacggctgggatttgacaggttcattctgaccgtggaaggtgaacacaagctattctgtctcctggaccccgaaaaacagtccgatggacagttccaagccctgatcctggcagaccccatgacttctagccacaggtggaggtttaccagtctggtttagcagactttagcacctgagaccaagagctccagcagctcactagattctgaccatacctggaggcaacctggtgaaagaagaggcttggaaggaaccagccctctgagtcccagctcctcgcacactccaggtgtgcctagggagccctcccatttgactccacagggtcctgtcatggcccatggagagaggttgaccctcctgtgttgctctgatgttggctgcaaaatattctctctgtccaagaaaaagatacatcaccttccccagagttctggccagaagttctcccaagatgacttccccttaggccctgtgagcatctcccatgggggccagtacagatgttcagtggacacaacctctcctctaggtggtcagcccccagtgacccccctggacatcctgatcgcaggtgagaagcccagcgggttcagttagggacccaggctctgtacaggccctgccaggggagcctaggtggtgatggttgggatgaggggtgggggtctcaagggagggagaggcagagagagagagaggatggattgggcggggacggggaaactcagagaaaacagagacagagatactgagggtcccagagagaggcctggggaagtctcagctcagaacaaggtggggcggctcctcacccatccttcttctctccaggacagatccgtgagacagcctccctcttggtgcaaccaggccccactgtggtctcaggagagaacatggccctgctgtgtcagatgcaaagctgggtggacagacactttccttctatctgaggaggatgcagctgacaagaccccaccctcgtatctaatatcaaagtaccctactctgtggtagaggttgaattctccatgagtcctgcgacctcagcccatgcggggacctacaggtgctatgcctcatagagtgtttaccccaagctgttgttcccccagtgacctcctggtaatacaggagttactaagaaattgttttaggcagatagtaagggtaaaggttcttggtggaaattttccagtaataaggaacaatccctgaaccatctcttttctaacagaaatgacagcttaaatggcccggccagcaagctttaatgtgcaaatgccaaccattaaaaactgggttcactcaatatggtgattcctactgtcttctctttgttaccacctgtgccaagtgtgatggccacctccagacaacaccatgtattcaaaacatcatggtgacccaaatgaatgaaaaagccctttttaatatgcatttttaaaggcctacagaaaaccagggccaaacctctcaattactctaaactgtctataatggaacaaaagccaaataaaaatcttgtagcctttataaaaaggctaaaagaggcactaaaaaagtatatctttttattctctaatccagttaagtaacagctcatcctgagggacaaatttattacacaggcagctcccaatattaaaaaaaaaaaaaaaaaaactacaaaagaaagctacaggaccaaatagcaccttaaaaaacctcctgaaggtggccactttggtcttttataatatggaccaggaggagtcccaaaagaaagaaaaaaagctcaggagaaggacaaagtctctagcagcagctttgaaggctcgcaaagtcccagatcaccaagatgcatcctctagttgctattagtgtagcaggccagaatgtccagtcagcaaaatgaagcaacctccactctgtccagcctgtggcaaaaaccactgaaaacagaactgcccccagacatggaggtcactgagttcaaaaccagtctcacagatggtccagcaaaactgatggatcctggtgcttgaacctaggctccagtagctcaaactgccattatagcacaagagccctggataattctggaaattaaaggaaggaaagtagacctccttctaaacactaaagctagtctctctctcttttctattctctaatccaggcctcccttcttccttcatcacaaccgtaaggggcatcttaggaaaaagtctaatccaatattttctcaatcttagttaaaacatgctttcggtcaggcacggtggctcacgcctgtagtcccagcactttgggagactgacgtgggtggatcacctgaggttgggagttcaagaccagtctggccaacatggagaaacctcatctctactaaaaatacaaaaaattagccaggtgtggtggcacatgcctgtaatccaagctacttgggaggctgaggcaggagaattgcatgaacccaagaggcagaggttgcagtgagccgagatcgctctattgcactccagcctgggcaacaagagtgaaactccatctaaaacaaacaaacaaacaaacaaaaaatcaaaaaaacatgctttcaagccattgaagccattgtcatgatagctctactagtcagaaaagcctgcaagttaaccctagaaaataaaaataatttaactgtttacagcccacataatgtagcagaatcactgtcctctagggggagctcttagctggtaaacagcccgtaaagcaaaaagtaaataaggcagaataagcagtagtcactctctccaggcacaaacactcaattagctgagttaatagctctttaaaaagcacttaaattaagcaaggaaaaggcagctaacatttacactaactccaagtatgctttcttggttctccatgctcatgctgccatttaaaacaaaaaaacatgttcttactgctaataaatctcctataaaaaatcaccaaaaaattagcaagttattcttattttttcttccacaaaaagtagcagggatgcattgtaagaaacatcaaagaataaacaataaggtagccaaaggaaataagttagccaatcgggcagctaagtcaaaggcataaaagcttcaaggccttaatgcacttcaagccccttctaatctaaaaaggctccataagagaaatcacacctcagtattcccctgaaaaaatagaataagccacttctcaagggcatacttttcagccctcaggatggctacagtcaggatggcaaatttattggtcagcctccagccaacagaaagttcttgaagtcctaagcttttcactcaggaaaaaataaaacttatcaatgggctcaaacattgttttcagacgggaaacctctagaatggttaaccacgtaacctctctagctcacttccaacaaaaattgacacaatagcagaagcccagccctaggaaataaaaccacctttatttaactcaggaaatttagtattagtaagaactctcatctctgtctccttccctaagccaagctaaaaagggccctacactgttcgtctttcaacctcctcggcagtaaaagttacaggaatcaacttctacatgcatcacactcaagtcaaagccaaaaagctaaaaaaccaacccctaacagtaaaaaaaaaaaaagctaaatattaatgtaaaaaaatagaagatcttaagctaaaaatcatagaagataagtaactaagtaagggctacacatcttactcagtcccactcctacccaccaaatatgttttattatttctaaccttttctcacaaagttcacggccaaatattaaaacttctttttaacacttatttgcagcaaaatttaaatattcataaaatc[139 bp omitted]ctcccgagttcacaccattctcctgcctcagcctcccgagtagctgggactacaggcgcccgcca[146 bp omitted]gcaagtaaagttttaaacaaaaattactggccagaaaaaaaaaaaaagccattcttgtgaaaattgttgtagtcacactgctatttgcaatgaaactatactctgtggcacccacaatgtagaattctggttgtaaaattgtaattgtggtaatattttgcctgattatcatccttataacaaaattaataattgcagaaaaaatttaatcaaggttgttttgcttatagcagaagtaatagtaacgaataaaaagcaagcattaaagttttactagcattaagtgtaataaaactttttaccaaaggttggtgatataatgcactgtaagctataaaaaggttataaaaacatttacataaaaaaggattttgtatggtgaatacttgtcctaaaagaaaataactggttgtttaaaggaagaatgtttaggacaagtctaaaagtttaagtgtgttgtaagagagtctgtgaaagtcataaaaaatttaataattaaaaaaagtcaaaattaacgctaaagttattttagccacccaataatgtatttctcccaatcatactgcaagtagtaaaaatggcctaagcctaaagttattctctactggcacgttaaggaggaaacatatgcttttctctaggaaaaagttacttttacagtaacgttcctggtaatgtacaccgacatctagtggaggaaaacctgtattgcaatccattgatacaacaacaggtgtcaaactccactgtcacttagggtctgtaggactgccactaacgatggtattttttttttttttgaaacagagtcttgctctgttgcccaggctggaatgcagtggcacaacctcagctcactgcaacctccgcctcccgggttcaagtgattctcctgcctcaacctcccaagttgctgggattacaggaactcaccatcatgcccggctaatttttgtatttttagtagagatgaggtttcaccatgctggccaggctggtcttgaattcctgtcctcaggtgatctgcccgcgttggcctcccaaagtgctgggattacagacatgaaccaccacacccagccccaatggtggtaatcttaatactcatattctaaccctatattttaaaccttcttgtaaaatttctctctttttgcctaaaagtaattaaactccaaatggtgctgcaagcaaagccacacatggacacgccattcttttgagaaaccttaaatcaacctcagaaaaaggcccaactgctgttcccccacacaacaccccttttcagcaggaagtagccagaaagaaacatgatccaacacgcactaacagcagttagctttgcctctctttaaggggaggaataatacaggagttattaaggaattattttaggcacatagtaagggtaaaggttcttggtggaaattttcctgtaataagaaacaacccctgaaccatctcttttctaacagagaagctgtcttaaagagcctggccggcaagctttaaaattcaaatgctggccattaaaacatgggttcatgcaatatggtgatttctgccatcttcttatcaccacctgtgccaagcgtgatggccacctccaaataacacaaagcatcatggtggcccacatttgcatattaaaaggctaaggtgggaggaacaagtttttcgagggctatgtaaatgacacacctggcctaaccaatcccctgggccctatgcaaaccagacacttgcctcctccagcctcccaatataagcaaccacttttccaccacacacggggttcttctttgttccaagctcccctcccttggctctgtacagaggagctcttttcttctttctttcttctttcttgcctattaaactttttgctccttaaaaccactccacgtgtgtccttattgttttatctaaactggcatgagaccaaaaaccctagtcaccaaagccatatcactggagctcatggtctcaggtaagaaacctccaacccgtgtccattgaagctggcattagtcgtgtgaatgtagaacttcatgttagtaacacagcttttaaaatgtttccctaaattgaggcggagcttgcagtgagccaagattgtgccattgcactccagcctgggcgacaaagagagactccgtctcaaaaaaaaaaaaaaaaagtttccctaaattgtatatttttactgtatacaacatgtggtattgcaacattcctatttgtgggttggctaaatcgatctaataaacatacacatcagttcacatacttactactgtttgtggtgagaactcttaaatctactctcacagtgattttcaagaatagaatatatcgttattaactatagtcaccatgttgtagcatagatctggaagttattctgtcaaactggaattttggacccctctatcaacatcctcccaagatataggaataaatgtgagcacatcaaaagacacccaaaccattacttattataaaaattcataggaatccacagtgagacactacttcaaacactggattggccatattctgaaaaataacaaatgtcaggaagggtgtgcggaaagagaaccttcacgcactgctggcatgattgtgaaatttttcggtgactgtgaaaagtggtttggaggccgggcgtggtggttcacgtttgtaatcccagcactttgggaggccgaggcaggaggatcacctcaggtcaggagtttgagaccggcctggccaaaatggcaaaaccccttctctactgaaagtgcaaaaattatctgggcacggtgcaggtgcctgtaatcccagctactcaggaggctgaggcagaatagcttgaacccaggagcagaggttgcagtgagccgagatcgtgccgctgcactccagcctgggtgacagagccagactccatcaaaaagaaagaaagaaagagagagagagagagagagagagagggagggagggagggagggacggagggggagagagagagaggaaagaaaagaaagaaagaaagaaaaagagagaaagaagaaaaagaaaaaagcggtttgacagttccttaaaagatgaacctaggaaggcttatatgctgttggtggtaaattagctcaacttctatggaaaacagcatagaggtttctcaaagaactaaatacagaactgccgtttgacccagcaatcccactactgtaaaagaaataattatattaaaaaagacacacgcactcgtatgttcaccgtggtgctattcacaatagcaaagtcatggaaccatcctagatgtccatccatcgtggcatggataaagtaaaagtggtaaatatatagcccagaatacagcatagccataaaaaatagtgaaatcatgtcctttgcaggaacatggatggagctggaggccatgatcctacgtgaactaactcagaatcagaataccaaacactgcatgatctcacttacaagtgggagctacacaataggcactcatggacataaagatggagataaacacagggaaacccaaaag[142 bp omitted]atgtgcagaaaccccatctctactaaaaatacaaaattagctgggcatggtggtgcatgcctgtaattccagctactcgggaggctgaggcaggagaattgcttaaacctggaaggtggaggttgcggtgagccgagatcgcaccactgcactccagcctgagcaacaagagtgaaactccatctcaaaaaaaaaaaaatctatctatctatttatatatatatatacacacacacacatacatacaccaaacaagcacatgtaccttttgaatataaaataaaataaaataataatataaaataaaataaaaaataaacctagaattactctatgatctagaaatttcacttctaggtatgtgactaaaggtttaggttatacaagacgaatgaagtttgcaatgtaccctacaacattttgtctttagttaacaatactgcatcatgaagttaaaaattggtaggagaattaactcttcctaccacaataaaaaaaaagactgatagtagatattgtgaaaggaaattaaattttgggaccccacactcatttagctaagggggaaagtcaagctggggactgggtcacacaaacctgcctctccattttggttcgtgaataagatggctacaaggtgaaaagctacatgcctcccccacgttttgcccacaagaagattcctagtgagctgttaaaatttcaccatggcaatgtaaattgatagcttatctttccaatgtatattgatagcttatctttccagtgtatactgatagcttatctttccagtgtatattgatatcttatctttccagtgtatgatagcttatctttccaatgtatactgatagcttatctttccagtgtatactgatagcttatctttccagtgcatactgatagcttatctttccagtgtatactgatagcttatctttccagtgtatgttgatagcttatctttccagtgtatattgatagcttatctttccagtgtatattgatagcttatctttccagtgtatattgatagcttatcttttccaatgtatattgatagcttatctttccagtgtatattgatagcttatctttccagtgtatactgatagcttatctttccagtgcatactgatagcttatctttccagtgtatactgatagcttatctttccagtgtatgttgatagcttatctttccagtgtatattgatagcttatctttccagtgtatattgatagcttatctttccagtgtatattgatagcttatctttccaatgtatattgatagcttatctttccagtgtatattgatagcttatctttccagtgtatattgatagcttatctttccaatgcatattgatagcttatctttccagtgtatattgatagcttatctttccagtgtatattgataacttatctttccaggtacagtctccccagcccatcagacacaaatgcatatctgatcattcccccacccaattttgtctatgtttatcttatgtaaaatgcagattcactgcatattttcctctgccccatttgtttttgtcgtctgatgtaaaaagtgcagattcactgaaccagacaaaggcatgaatgactatttttaaaaaaaatacagattcactgagctagacaaaggcatgcgtaactatttttccttaccctcctcttacatgaaaattgtgtgcttctcaatatcccgccctttaccctttaaatttggatccctcaaaatcatcttcagagaaaggcatagatctgtctcccaggcacatctttaactttggcaaataaatctcctgaaatgataagagacttatctcattggacaatatccaaacacttgtgcccaagtgtttatagaagcattattcacaataaaaagataaaagtatcacaaatgtccaccaaccaacgtgttgcatccatatgttagaaatttactcatccataaaaatgaagtactgatgcatgctgcaatttggagattcaaaatatgaagctaagtgaaagaagccagatccaaaggtcacatactatatgattacatttatataaaatgtccagcagctggaaatccacagagacagaaagcagattgatggttgcctggggctgagcaggggtagggagaggagagggactgctccgtggaacggggttccttttggggtgatgaaaatctttgggaactagaggtggcagttgctgcaatgaaaatctactaaatgccacagagttgtatatatatatatatgtattttttttttgagacggagtttcacttttattgcccaggctggagtgcagtggtgtattctcgcgtctctgcaacttccgcctctcagtttcaagcgattttcctgcctcagccccccaagtagctgggattgcaggtggccaccacaacacctgtctaatttttctgtatttttagtagagacggagtttcaccatgttggccaggctggtcttgaactcctgacctcaggtgatccacccgcctcggccccccaaagtgctgggattataggcgtgagccactgcgcccggcctagagttgtatacttttaaagggtcaattttacattatctgtattttacttcagtgaatggaaatttaagaaaaaagagcatggttctatgcagatttcttttatcttaaaaagttgcaacatgacccagtgttttttttttttaatgtgaggtaggattcctaataagtgagagacgtcctaagtcccacagtgttcagacatgaagctgatcttttcaccttacatcttaaattctaatgtggctgagtacagaattcgggatgagctccaggattcctgcagtctgtaactttttctgacactttaccattccacccgtgatgacggattgttcctgacttacctttggaacataaaggctcttacaccacgtgtctggatctggtaaaagagattacacgagattgagagccttacatgtctcaggcaatactcatcctcaaaccaaccctgagatatgggtcattatcttcttctataaggaggaaaatgggaaagaggtgttacatgatcaaggtcaaccatcagtaaattccaccctcatgtcttacattaacacctgttcatttcctccagggatcactcttgcccaaagcatggagacagaatccatggtatcagctgagggctgtgagcagggaagaaaagaggtagtaaggaaggagaaatgactcagatgttttgacagagagtgaccctgtttgccccaagaacacttgcgggttacagtcctaatcttacccccaaagtgttcccagaccaaactgagggtggggctgctatttctcatggcccaataatgagatgcggatgaactggggagggagagagtttttatttctgttaccggttacagggagaaggcctggaaaacattgccagaccaactcaaaattacaaagtttcccagagcttatataccttctaagctatttattaaaaaatgcagctattttctaagctatcttctaagctaagctaagaagatagctaagcttcttctaagctaagctaagaagatagctaagcttcttctaaactatctaagctagataagcttccaaactatcttctaataagtttagaagattctaagccattaagctacctaagctatagtcttctaagctatcttctaatctaagcttagaagcttagctatctaaactaagctaagatattctaagcttctaatatccatctttcacatcacccatttcctgcatgggatatggcacgccagagacccaggggatgttttctgcatgaatctagtaataaacaaatacctgcatccctcagggctgataaagagtctataaacctcagatggagagtctagaatgttagaacataaaccagggaatgtgtcagatgcctaagaaccttcacagcaattctagcaattcttcataaaagcagctgtcatttactgagcatagttcatcaggttatctctaggcatataatgaaaataataatcatagtaaaaaatagcccacattattgaatgactgctaagaacatggtagaatttcactttgtacatcacatgtattaactatgtagttccccaccaaaaccatgtaaggtagatactagcactatactaagtttatatatgacacaatagcaatgtgggtaactttccctaactcacgaagttaaaaggggcagagctgtgatcaaatctcaggcttcctggctccagagtcttccctgttagttcaactgattgcttcctatgagaggtagaatataataatctctgattgtcaacccaccaaatatccttacaaagaagacatttttattattgcaattttatagaaaagcaaagtgagcctcagagaggcaaagtgactttcccaaggagacagagatagcaagaggcagatgtaggttttgaaagtactgtgatgtaactccaagcctgttgcttttttttttttttttgagaccgagtcttactctgttgcccaggctggagtgcagtcacgtgatctcagctctctgcaagctctgcttcctgggttcataccattctcctgcctcagcctcccaagtagctgggactacaggcacccgccaccacgactggctaattttctttttttttttttttttgtatttttggtggagacagggtttcactatattagccaggatggtctccatctcctgacctcatgatcatccctcctcagcctcccaaagtgctgggattacaggcgtcagccactgtgtctggccccaagcctgttgctttttagtcaataccctataaactggtttcctgaacatggtctggaaagagatgacctgaggtggatgaggaagagccaactctaaatgccaccctgggccgtgctagtggttgtcctgctgggtgagcggctaacatcataagcttctgaattccattcctattcagaatccatggagtggatgtgtctttttccaatttattctgatgcattcgctaaatatttattagacaccttcagggaatctctatttaggagtctctaagagggggcccagctcatacaaatgtatcaactaacacaccagaaaacagtggaagccttgttgcttcctggactctgaccatggtgctgaaactagagttcatggcaacatcccagtcagtgctgtggacagcgaccacaggagccactctcctggggctggggcctgatagaggaaataggaatggtgtctagatacagggccaggtctgttggagaccttgaataggagccaaaattgaacaggatgtggggaagctcaagaggttgatgacgtctagctggaccatggaatgttgctatctaaataggcaattatttttgtactctacaccagggtaggcagacaggaagccaagagggaagcatcctggaacttccttcgtcatacagaatactgagtttccttggctgctcatgagtgtatattatgagtgcaataaagtttgagtgcgattatcccttagactaaaatctgtttttgcaagagttttcttcagagaaatggaaccaatcagatgtttatttatgtatatacctatcctctgtctatctagctatctgtttatttctctaggaatgtgcattatgaatacaatatggcccctcttactgtgggccaacgtttgttccatgttttagccaatgaaccagacaaactgttagagccatgtctagctcactgagatgcaacattaaatgcaggatctctccttagtaggtccatatcaataacattggcctggctcaactttatcttcctttcaccattatccaacacccttaatgtccattcgcacacatgttccctagatttctaggtgtataaatcagaagaacttagtagtcactttggagtgtagcacatttccccatggatcacacattgaacctatggcttagaagcaaagatgggtagtgggggcggatcctgaggaaaattagcactgtcttgcatggcaactgcctccgcggaggccactattgtttcctcagacagtgcagggttaatctcctcagatgcacggggagagaatgcttccattgtcaaagagcatgattaaggaactcactgtccttaccttcatcagtgtctttcacacatccctattccaaatgtcaagattccacaccttccgaatcaatacccttaaagtagacaccctttgaggctgggaattccatttgtattgtaatttagccacttgaagggtgagtttctgggtttgctttttctttttctttttttttttttttgagacagagtcttgcccttgtcccccaggctggaatgcaatggcacgatctcgactcactgcaacctccacctcctgagttcaagcaattctcctgcctcagcctcttgagtagctgggattacaggcaccagccaccacacctggctaatttttgtatttctagtagagacgggatttcgccaagttggccagactggtca[131 bp omitted]atcttttagggcagatatagaagtcttagctcatttatgtttgcacttgaactgaaaattcaaatctttgaattcatcctcttctttccccaactttgtccagtgacaacccagccaatctcattatgctcattagttttcaaaaacattcaaaagtattatgtacatgatcactcagattcttttttttttttttgagacggagtcttgctctgtcgcccaggctggagtgcagtggcatggtctccgctcactgcaagctccgcctcccaggttcatgccattctcctgcctcagcctcccaagtagctgggactacaggcgcccaccaccacacctggctaattt[144 bp omitted]agattcttataaatgtttgttaggcgtttccaatgatgacatttggtgtatccctatggccacatcatgttatgcactatcaacactactggaaatggagtcattagtgtttttaaatctaatcaaattagaaagccgatttcagaaactttggatccaattcagaaaactcatccttaaaaattctgttcctttggaatcatccctggaaccaaaatgatttttttttcaagggttctccagagaaattgaaccagcagaatgtttatttatgtgtctatctgtgtatctatgtatctatctatgtatctatccatgtatctatgtatctatctatttatctatctatctatttatttgtttatctattcatttacctaggaattggctcatgtgattgtaggagcttggtgagtccaaaatctgcaggacagtagagtatcctggagactcaggaaagagttgtagcaaactaaaaaatccaaagacaatctgctggaagaatttcttcttgctcaggggagctctctgctattactttattgttattttgctcacaagacatgtatcatcctataacatattggattttctattaatttttgttgttgtctaatatccatctttctcaactataatattgattcaatacagacacttttttagaagtctttctgtcttttttctgatacatcttatacaccaagaatcacgtttgacccattagatacttaatgtgtgcccatgaaaacagtgaataaaagtgtctccacttcttccaagtttatttttaacactggagcaaatgatttctacttgattctctctttttttctcccttccaggctgcctttagtgcaaagtcctcagaatggaaaaatattcttgggggaggcaaaaccttaaggttggcaagaaacaaaccccagccttatccttactttccttctctcagttagatctcaatgtccttggctgcaatgccgtctctacctagtctacttcaagcttcccagatatgatttcctctctaagtttctctgtctcttcctgtctctgtctctctattgttctgtttctttccatctctctctttcttgctccaactttctcagtcgactaaaactaatagctacgaatagctttcagtaatttgaacatttcacggatgtttttctagatcaactgaaatccctatgcaaacactgtcactgtacttgcagatgaaatgataatcacttcccggcaagaaaaggatctcatggtagtcttaagcctttatctcagggttaagatgcccccttttgtggaggtgcttagactgtgactatggcagttgctttcccagcaagaaactgcatttggtaagtggaccttctttcagttagagagccatattcttagagatgtagaatatttgttgcaacatatatgtgtgtgtgtatatatatatatatatatatatatatatatatatatatatggtgtaaacatcccggtctatttcccctaaggtcaaaactgaacatggaaaagaaacatggggcaggggtattttctgagagttcctgagacacagaaccaccccagccttcccactcagggctgcctggcatctcctgtttaccttctctgtcatagccccatctgaaagactctgtctgaataaatataccaaacctcatagtcttagctctcctctttgtacgaggggtaagagtgtgttcaggtcttggctcctgttcacacacctgttgtctaatggcaactggtacttaggacatttgaaatatctctggtggctgcatgctgcactttggttggcaatggctgtacgtctctgaaaaccttctgtgatgattgcaaaacggtacactttcatctcctttcttatgggttccggggagccgaatgcacttgatttcaccagtaatatatgtctatagacaatttctcagatcggcgtgaagaaggtaaattatatctttcatttagaaaaatataaatctcacttttacaaaacgtgactaagaattgtcaaggcttagagagcaggaataatcagggactatatgggtgttcatgtctaataaatgcaactctgatccttaaccgtatttaaaagcgctttcagagttccgaaaccttttcatctgctccagattcactgggttctgaagccaaagctttctgaaactgttcctcctctcagcccctaagtggtgaacgcttggtctgttctgacagctgagatcctagccacgggagcgtgaggtgaggaatttcctgtcaccatcccagaaagtaaaatatagcctcattatttcctaattgtgtttccataagaaaaacaaagaattcgataaaagaaacaaagaccagtatttactttttcataaatgattgtagttactgaaggacatatggggcccgtaatcacaacgggtctaggactcacaggtattttctcgtctccattatttaccataattgtgtcattctcactcctgcttacatgatttatttggtataatttaaatgtatttgtatgttttctctatgacttaatgggcaacatgcccctttctctaacttgtgtttgttggtttgttgatctctgatacaaatttgctaaatatattctagttgttgttataaaatattttctttccaagaaaatttttcaacaggttcatgtgcacaccatatatgaaattcatattcttttcttattctcttatttttctccccatcctctacaacacttgggccaaactgttatggattattgtgtatccaccaagaaatggctttgagtttttaaagtatctatttctctgaactaatctgtaatttccaagaatctaatatttctcaatttttaacaccaattattttactttgtaatttaacaacttgttaattattaaacaagtaaaaaatgcaaaaataaaaactatgttttgatagtttctaatttatattctttggaaaatgtctaaattttaggaaattaaaatttttttcgaattgaatgtggctagaaataataatttttcactgcatggcattacgtaagtgtaatagaattctactctcatcctactttagataatgccaaactgagaaaccattattaatttattttgtttttgtctagacatgaaaatgaaaagttgccatcagaagaatcattatggaaagtgaaaatatggtgctaaattaaatatgtggcaaataaatgtgtttttttaacttttaggttcagaggtacatgtgcaggtttgttatataagtaaattgtgtgttacaagggtttgaagtacacattattttgttatccaggtgataagcatagtaccaaataggtagtttttctgtcctcaccctccccacttcctcaaccctcaaggaggtccccctgtgtgtgattaccaaggaggccccactgtgtgttattacctcctatgtgtccattatgtattcagtatttacttccaacttataagtgacaacatatagtattcagctttctttttctgtgtcagttctcttagaataatgaccaccaggtccattaatgtggctgaaaatgacagtatcttattctttgttttgaggcagaatctgtctgtcacccaggctggagtgcagtggcactatctcagctcactgcagcccccgcctcccaggatcaagcaattcttgtgcctcagcctgccgagtaaatgggattacaggtatgcaccaccacacccagctagtcttgttttgttttgtcttgttttttgagatggagtctcgctgtgtcgccaggctggagtggagtggcgtgatctcggctcactgcatcctctgcctcccggattcaagcgattctcctgcctca[134 bp omitted]gcctcccaaagtgctgggattacaggcatgagccactgcatctggccagtttttgtattttttttttttagtagagatgaagttttgccatgttggccaggctggtctcaaactcctgtcctcaagttatccacccgcctcggcctttcaaagtgctgggattacaggtgtgatatatatgatatatatgtgtcctcatggacacagagagggaacttcacacaccagggcctgtcagggggttgggtaggggggtaggggagggataacattaggagaaatacctaatgtagacgacgggttgatgggtgcagcaaattgccatggcacttgtatacctatgtaacaaacctgcacgttctgcacatgtatcccagaacttacagtataataataataataataataaaaagagtggtctctgggctataagttccctgcagaggattgcatcatctattttgtcactgcccccaccctaatgtttgtaggctcatatattatgccagttaatatgcaaagacttagggattcagtactgaataaaaatgagaatggccatggcctcatattgcttatgagactgccaaaaccgaacgtggtgtacataattacccagatgtatggtgacttcttaaaaaatgaagcatagccttgccatgtaatcttgccattttacttctgtgtatatatccaggggaagtcaaagcaaatacttgagcagatatttatacctccatgtgcacagcagcattacttacaacaaacaaaaagaataaaccacccaatgttcatagatggatgagtggagacataaactgtagtgtagacatacagtagagtatgtatgtcttacaaggaatgaaatcatgattgccacattctacaacacgggtgaaacttgaagatgttatgcagactgaaatcaggcaatcacaaaaagacaagtattgtatgattctatttatatgaagtgcatagaataggcaaacccatagagacagaaagtagaatattggcttccaggggctggggttgggggagagaaaatgggaattggtatttaatgcatacagattttcagtttaggatcatgaaaaagatctggagatggatggggatgatggttgcgcaacggtgtggatgtacttcagcaaggtgctgtggctcacgcctgtgtgtctgcgtgctagggtctcgggggttttataggcacaggatgggggcgtggcaggccagggtggtcttgggaaatgcaacatttgggcaggaagtgcccgtcctcacctaggtctgtgagggtggagccctagccagggaccacgccctcctctgcccagcacttcccttccctcttctgtattatttaaagggactacacccttcccttcccagcacttctttatcaccacttagaaaggccattatcaaaaagacaaaaaataacaagtggtggctaggatgcagagaaaaggggactcttgtgcactgttgaaggcaacaagaaggagtgtggtcattacaggaaacagtacataggttcctcataaaactaaaaagagaaccaccctatgacccagccagcccagttctgggtatagatcgaaaggaaaggcaatcagtatattgaaaggatagcttcaccctggtgtttactgcagcactattcacaataaccaagatttggaagcaacctaagtgtttatgtacagatgaatggataaggaaaatgtggtacatttacacaatggaatattacccagtcgttaaaaagaatgaaatcctgtcatttgtggcaacacggatgagcctggaggaaataagtgagataagccaggcatagaaagacaaaggtagcgtgttcttactcatgtgtgggagttaaaacagttgatctcagaagcagagagcagagtcgtggtaactagaggctgggaagggtgggaagaggggagagggaaatgctggttaaaggatacagaattacagctagatggaggaaataataagttctggtatcctacagcactgtagggtgactatagttaacaatagtttactgtacagctagatggaggaaataagttctggtatcctatagcactgtagggtgactatagttaacaatagtttactgtacagctagatggaggaaataataagttctggtatcctacagcaccgtagggtgactatagttaacaatagtttactgtacagctagatggaggaaataagttctggcatcctatagcactgtagggtgactatagttaacaatagtttactgtacagctagatggaggaaataagttctggtaccctacagcactgtagggtgactatagttaacaatagtttactgtacagctagatggaggaaataagttctggtatcctacagcactgtagggtgactatagttaacaatagtttactgtacagctagatggaggaaataagttctggtatcctatagcactgtagggtgactatagttaacaatagtttactgtacagctagatggaggaaataataagttctggtatcctacagcactgtagggtgactatagttaacaatagtttactgtacagctagatggaggaaataagttctggtatcctacagcactgtagggtgactatagttaacaatagtttactgtatattttcttttttagatgtttttattatactttaagttctagcgtatcctagaagctttattcagtactgaatcccaaagtctttgcatattaactggcataatatatgagcctacaaacattagggtgggggacagtgaaaaaataaatgatgcaaccctctgcagggaacttatagcccagagaccactctttttttattattattatactttacgttctggggtacacgtgcagaacgtgcaggcttgttacataggtatacatgtgccatgttggcttgctgcacccatcgactcgtcatttacattaggtatttctcctaatgctatccctcccccagccccccagccccagacagtccccagtgagtgatgttccccgccctgtgtccaggtgttctcattgttcaattcccacctatgagtgagaacatgcggtgtttggttttctgtccttgtgatagtgtactgagaatgatggtttccagcttcatccatgtccctgcaagggacataaactcatccttttttatagctgcatagtattccatggtgtatatgtgccacattttcttaatccagtctatcattgatggacatttgggttggttccaagtctttgctattgtgaatagtgccacagtaaacatacgtgtgcatgtatctttataatagcatgatatataattctttgggtatatacccagtaatgggattactgggtcaaatggtatttctagtcctagatccttgaggaatcgccacactgtcttccataatggttgaactaatttacactcccaccaacagtgtaaaagatttcctgtttctccacatcttctccagcatctgttgtttcctgactttttaatgattgccattctaactggtgtgagatggtatctcatagtggttttgagtttattgtatgttttcaaagagctagaactcctgggctcaagtgatccacctgccttggcctcccagagtgctgggattaagtgcgtctttattataacttataattgacacataataattgtatatatttgtagggtatagagttgatatttcaacacatatatataatgtgtaatggttaaataagagtaatgaacatatccgccatttcaaacatttatcgtttctttgtgttgaaaacattcaaaatcctctcttctagctatctgaaaatatacaataaactcttaatgagtcaataggttgtcgttggtggcacttcttgtggttatagggattactctttgctgtccgtgtttgttgaatggttcatttcttacacacctaattatccatggaaggtagttcttagtgctctcctgggggtcagactgaaaaagaggggattgttccagctatccctgctgcatgatctcaactcctccaaacatatcatctgcttagggttttgcccagcacaggagggtctagtgtgaacctcacactcacacgtgggacagacacccatatctgacaatgtcgcggtgaatctgtttcacacaaacaagggagatgattcagtgtggaccacgggcccatgtcaatgagcagagatatttccagcgcctgtccacacacacaggggaggaggaaccacagcttccagcctcacccaaagccctgactcctccctgcctgtgaggacctggggttcctcttctgtcccacacacagaggtggaaatctcccccactaatgagccctgggtggtcccaggcaccagtggtccctcagctctggtctatgatctgtcttacggcaccctgtctatttcaggaatttgttatttaactttttctacattaagaccatgactacaggattcagaaatatcgtaactaggtttctcagtgttcaaagttgacgtcggctcttcatgggggcatcaatcatcgtcctccactgtggagcccaacatcaggatcctctcccatccccaccctcctgtcttaactggtctagaaattaaccatggctgagcccctcccatgtcctgggcaccactgacccccatagccactgtgatgagtggggatcatgacaacaggctccaaacgtggaaattgaggctcagggatgggatattacttcccaaggtcacacaggcaggggatgataatcaggaattaaataaaagtcacctcccaacccaatgtccgaaatcagagctcaaacctaacgtaattgctccaaaaaccttaaacgtggattaaggcacagaggaaggcccaggaagtgaggggcactgagaaggcaggaatgacttagaggtttgttctcaggggtggggggtggatgctgctgcaaaaagaaaggaaggaaagacagagggaaggaaggagggagagagggagggaggaagaggacggaaggaaggaaggaaaaaaataggaagtttggtagaaaggaagagactgttcttgaagggacaagaaagggactgtttggcagaaaggaaacacacactccagggacagaaaaacatatgttttattctctttattccctgcatctctcttgtgttctcactgccacatgcagctcagcctcggctgcacagccaggtgtcaggtgcgtctctgctgatctgagtctgcctgcagcatggacctgggtcttccctgaagcatctccagggctggagaatcactgaccatggtaaggaccccgcaacgctgagctgatggatgggctgaaggagggagggagaccccatggggaggctctgagcgggaggaggtcaccctcgcctgaaaggggctgactccggaaggcatcaggtctatttgctgttgtgtcccggctctcggtaagataaagacagatcaggcagacagtggcctgggggcagggagaccccatttctctctgaaatgtctgcagagagcctggtgcccacccccatctcagccctggggaaatgagagccagcctcctggggagggcagtttccgttcctgtgggctgcggatgagataaccccatgacaagaaagacccagcctctgaggggccacaccctgtgtgtctctctgtcctgccagcaccaacggctcatccatttgcaaagctgaaaggaggcagaggagacgccatgaccgccgccctcacagccttgctttgctttgctttggtgagatttgaagaggagagaggaaaccccacaggccctggtccatcaagagatcccagggctttagggagctcccaggcaggggaggacttgctcaggcttcacggggcaaatccctcactgggaattctcttccagggctgagtctgggccccaggacccgcatgcaggcaggtgagtctgtccccagctctcccaggtccctcctcctcaccctggacagttggggatggagacagcagttctgggcaggcagctgggatgatctgaggggtggggaaggtcttgggatccaggctttgatttccttccatgtactctccccaggcccaccctctgggctaagccaggctctgtgatcagctggagaagccccatgaccatgtggtgtcaggggaccctggaagcccaggagtaccatctatataaagagggaagcacagagccctgggacagaacgaatccactggagaccaggaacaaggccagatactccatcccatccatgacacagcaccatgcagtgagatatcagtgttactatctcagccctgcgggctggtcagagcccagtgaccccctggagctggtgatgacaggtgagaggacactcaggggtcccagccccaggctctgccctcaggaagggggttggctctcaggggtgtctccctctcacagcccagccctggggatgatgtgggaggtgggagccccatttaacatggtgcctccttctctcctaggattctacagcaaacccaccctctcagccctgcccagccctgtggtggcctcaggagggaaagtgaccctccgatgtggctcacagaagggatatcaccattttgttctgatgaaggaaggagaacaccagctcccccggaccctggactcacagcagctccacagtggggggttccaggccctgttccctgtgggccccgtgacccccagccacaggtggaggttcacatgctattactattatatgaacaccccccaggtgtggtcccaccccagtgaccccctggagattctgccctcaggtgagggagccacggccttctctaacacactttccggacagctgacaggttgtggggagtttggctggtgactgaatctggaaaggacccacagtgatgtgttgatggatgggctgaaggcatgagggagaccccatggggaggctctgacatgggaggacagagctctccccctgtcctggcccctggagagaccctgaccctccagtgtggctctgatgtcggctacgacagattcactctgtacaaggagggggaatgtgacttcctccagcgccctggccagcagccccaggctgggctctcccaggccaacttcaccctgggccctgtgaggggctcccacgggggccagtacagatgctccggtgcacacaacctctcctccgagtggtcggcccccagtgaccccctggacatcctgatcgcaggtgaggagcccagcgggttcagtcagggacccgggctcggcacaggcattgccgggggagcccaggtggtgatggccgggatgaggggtgggggtcccaagggagggagagacagacagagacaggggatggggggagggggagactcagaaaacagacacagagactgagggtcccagggagaggtctggggaggtctcagctcagaacaaggtggggcagcccctcacccatctgtcttctgtccaggacagatccctggcagaccctccctctcagtgcagttgtggcccacagtggcctcaggagagaacgtgaccctgctgtgtcaatcacaagagtggatgcacactttccttctgaccaaggagggggcagcccatcccctgctgtgtctgagatcaaagtacggagctcataagtaccaggctgaattccccatgagtcctgtgacctcagcccacacggggacctacaggtgctacggctcactcagctccgacccctacctgctgtctcaccccagtggccccgtggagctcgtggtctcaggtgagggcgctgaccctgtcctctctgagctcaaaggctcagctcaggccctgcccccagcagagctctggacactaaggaaagaggggagtgaagggagagggtccgcaggggagggtccagcccatgggaagatggaaatagacagggacctcccacccctggctcccacccctgaagtctcagtagagtaaagtgcagggagggctgggaggagacggggggtgaacctcaaaggagttgagattagactgagggtggaagacggaggccccacctgctcccatcctggtgtctccacctcagaatcagagcctctgtgtcccagtccccaacagacgccctcctggagagagaagcatccaggctgccggtgccacctgcatccacccccgacccccccccaccccgccccacttcctgctttcccctgcagcctccccagcactcagcgcacacctgagcctcacagggacttgcacgtgctcccgcagcagctcagggaatgtgcaccgctcctcttctgcgccgttgacattttttatttgggtttttaaaatctcatattggcctttttgtccaagctggtgaaagtagatttgcagcatcacctatttttattctcacccggtttcgtaatagccctgatctcacgtgctccctgaggttttgtaaacttcaggtagaaatgtggacttccttcgttctggacatttgctatggagggggtagggcttatcttttcagaaaaagtcaaatgactggtaccactccttgaaaccctacagcactttccagacctcagagggagggagagagaggcagagacagagacagagagacagagagagagatattggggccgctctttcctggccggttcatcctggcctattctcaatccaccaaggccccgaagctcatctcccctcctcctctgcctcctcctccaccctgtagacaagcggccattcctttctgaagaacaggctgagacctttctgggacctgctctttctggagcctctgttgctccctgtctgggtctccacacgcctccttcctggccctttttcctattgaggaatcagcttcaatgtcacctccaagtgtgaccttcactgacgacacagctcagcccagtcctgcctgcttctcatttatgtcaagtaattaaccaacctacaccatgcggctgaattccttctctctctcttccactctctgcatatacgtgtgtgtgtgtgtgtgcgcgtgtgtggtcacaccaacatcttacgtgacattgaaacctagttatccgtatatctatacaaataatatatattcacacataaatataggtctctaccaatatatctaaaaccattgctacgactagtaaatttccactgctgtgtttctatatgtttgctgtttgtctccaggtgaacccacacttcaagaaggcagagatagtttttaaggcccactatatatataaaacagatatatatttgtgtttgtgtttttctgtgtgtgtatcacattctacctgttgctgcctatacgaataattagctacctagagattaaatggacaatgaaactccaggtgaagtggctgagggcatgaaggggaggcagccccagaatttcacccctttgtgcttctgacattgaggctcccctgatgactaaccctcatccacggagcctgggtcctcagctggtggatccgtgaaactctcatctccgggggagttggctcatgttctcctgtgtcccaggctgcacagagagcacacaggccttagtgacctctgtactggggaccactttccttgcagatcctgagctctcaggatgcaggaaaactctctcccagatgactcaggagcaatgtttaaatccatagaacacaggaaaactgaaatcgttcaatgaggagactagagggaatcctgctagcggaggaagaggttttttttttttttttttagaaattctgtaaaagtcacatcatgagacattaagtaataaaaaaaaaattgcagagcccaggtgagaggctgggctcaggtctctttttctctgttttgattctctggagcagctgataccctcagcccatcacaaaacaagtctgactctgagactggtatgtgaggagatactctcagtgatggggctggcactgagggttgggtcctgtgaaggggaggtgggtgccctgggtggacaatctgatccaccctgacctctgtgacctctttgtccaccatccccagcctcacaccttcaggattacgcagtggagaatctcatccacatgggcgtggctggcttgatcctggtggtcctcgggattctgtcatttgaggcttggcacagccagagaagcttcccaagatgcagccgggaggtgaacagcagagaggataatgtactttatagagtcgtgaagcctcaggaacagatctgatgatcccaggaggttctggaagaaaatctagggccgatgctatctggactgtctgctggtcatttccagaggaaggaatcaatgtccgagtgcagggacattttctggggtgatccatggagaaccattaaaatgtgatacctttcctctccattaatgttgactttccttggttggatctgcctcttttcccacacttagacatgaggctccatcccacatggcagcgttgggtccacacctctgcacacctgcatgctctggtccatggcgtgtcacacagtcctcttcatttctcattgccacacttcctggtgtactttactgggtcttcatgtcttcagttcagagttccgcacctggtttaggaactaattcaacgggagaagatcagagtccgaccaggaaaagataaatgcaccgtgatgccctcacctcctgtgtggaccctatgagctcttccctccttatcagatgctatctgtgtagtttctcctgaaatatcaccacctggaatcaacacactggcatttgaagtcacgacccaatggtatgctaattctgaaaaagacattttttgaaatgctatgattagtggcatttaccaatttccttgacgtaaattcttttttcatggccataatcaagatgccaacgagacatccctgaatgcagggttgggaagcgttggacagacttgtcttcactcataagcaccaggcatctgatagctcacgtatacatcttattaccttccattttagagtgaataatcatttctacttcagtattttggcacaggtaaaagcagtcccattactgcgcgtatacccaaaggaatataaatcattctattgcaaagatacatgcacacatgtgttcatcgcagcactattcacaatagcaaagacatagaatcaacccaaatgcccatcaatgatagactggataaagaaaatgtgagacatatacaccacggaatactatgaagccataaaaagaaacaagatcatgtcctttgcagggacatggatggagctggaaaccattatcctcaggaaactaacacaggaacaggaaatcaaacgctgcatgttctcacttacaagtgggtgctgaacaatgagaatgcgtgaacacagggaggggaacaacacacactggggcctgtcggggggggggtggggtaggggtagggagagcattaggaaaaatagctaatgtatgctgggcttaatacctaggtgatgggttgacaggtgcaggaaaccaccatggcgcacattgacctatgcaataagcccacacattctgcacatgtaccccggaacttaaaataaaaataaaaattaaaattaaattatgacaccatgatcctagcatatccaaaaaagacaaaaatgccaatatcaaa[137 bp omitted]cgtggtgaaaccctgcctctactaaaaatacaaaaattagccgggtgtggtggcactcgcctgtagtcctagctactagggaggctgaggcaggagaatcacttgaacccgggaggcggaggttgcaatgagctgagatcatgccactgaactccagcctgggtgacagagcgagactccgtctcaaaaaaaaaaacaaaaaaaaaaaaccctcaaaagctcaggcagcaaaagcaaaaataggcaaatgagatcatagcaaactgcaaaccttctgcacaatcaaggaaacaaacagcagagtgaagagaccacctacagaatgggaaagaatatttgcaagcaagagattaatctccagaaaatacaaggagctcaaacaatgcagaggttttgaaggatggtgatgagaaggttctgctacttacagaaaggaagtttaggagaaacaaaaccacaaacctaggtggtgggatggcttgatctgcttctgtctgtgactcacttaacagtcttaaacacatctccctaagcctccttcccccggtgggattcctgggtcttgtgaggacctcatcggtccctctggtaaacccaggcacagagtggagcagctcttgttttctcaggatcttccccttcacatacaattaacgcacccacacgatgctactcttagaacccttcaaataaatgtttcccggttcattcactaccagaatccaagctcagcttgttccccagcttaggactgagtggtatcttggaggtagtttccaccatagcccccttcctctgctataaggctcagtgacacaccagagacaccccctccagccaggctcctggaaggtctggatgaagactgggatgctgaggcattgctcagcaatgtggcttaactcaaacttctatgtgaaacttccaaccactttcagcaaggggtcacttccagcgtcttggggtgtgagggcactttggttggtccctgcaatatcagaccctataaagatcctacaaacatgttgcagactctttgaagattctggcactttcagacatgctgttgggaaatggtgacacccataaccttctagttccaggacagggagccttagcccagggctatgttttctgagggtcctcaaagtaaacagttctatgtgccaggagaaccctaaatctcatatggttctaagggcagaaagccacacacgcaccggcaaaaagcaagagattcaaggaaaagctgagcaaagacagacaggaaaacacacacatgatgagccagcttgtagagctagaactgagatggagagaggcacgagtgggtaacagagtgtgctccccagaacaggtggagagaatgcctttttcatgccctgaggataggctgggtaaggcttgtgctcgacagtcaaggactatttttttccccaggcgtctacaagagaccttccttctcagctcaactgtgccctgcagtaagtaatgatggagagaatgtgactttgctctgcagctctggaagctcatttgacctgtgccttctaacgaggaaggtaaggcccctggacactggctcactggggtgcagagacagagtggggcattcaggccaacttctctctgggtcttggggctggtgatgggacctctagatgctgcagctctctgtcgatggctctgcctgtgagtgatcagccctagatgaccactgttactgggggtagcccatgcctgctgcatgccctgtgaaacactaaatcatatagccacgtctgagggacagcctgctggagacatgggaatcttagggattccagacaaaatgaagcaatgagaaacacaaagaggaaaagagaggttgagtatgacagtggtgtcagggtgtagggtggtagacagggcagctccacactctccactgcttcctgtctggaggcccactttggggtcctacttatccaggtgagtgaaggaagaggtcaggacaaacacaggaggtgaagccagatacagtgtggggagataagcagtggcctcagcctctagcccttttccatcttccagaagcccctcctgagctctcatcacagacagatttcccatttggaaacccagatatttatcatgccgggggggggaggcaatgtctcttgattatggggactttccatcaccaggcacctgctagtcctctctataccttcccttcaggaaaggaattgtccctcatgggattccagggaagagaccccaggacccctatcagtcactagggagatgacagagtagaggaagtcaggggaccaaccctccacagagaatggtcctacttcagtggggtgagggaaactctcactcatccatttgctgtcctgttacctcggaaccctaagagaacttgttagtcacacacagaatctacccctgaatgtggtgtgcaaagtggggctcttagcctccagtgtgaagtccctgggaagatggaatgtccctgtgtgagtgaaggctgtgccaccgcccagctatgtggccttgggctaggcaacccctcccaggtccccagttccccatctgcatcggagactgtggccagtgcgggaatccacaaggcccttcagcctccaaagctctgggacagaggcctcgtccacagggaggaaggggtcagagtgacctgagtccctactcaggagcgagtctaatccactctccatcggggcctgtggggaagggaagatgaagaaacggagcctgcacctggctatgtgggcgcagtagattaaggggaggatgagggttcctgagagtgtgtcatgtggcagagaccctgcagcacactcaggaagggctctggaaggatccaaggaaattttccaagaagagggcagagtaagtgacagagaccctcaaccatggatttcactgaggtgcccatgatgacatagggagaacgggggtgtctgggcaggaagaatatcgtcagggtgaaatgaatggtgatgagcttcgtgtcagagctcctgtggagggaggggcctggcccacatgaaaaggtctctgatcctaccccagcccccagcccctgttctccaggatgacactgtgggaattccatcaggaggggtgtgatagggctggtcttcctggctcgattcacaacactggctggggactgggaacccatggggagccacaggtggaaagggaggagcctcagtgaacccagcaggaacaaacatagggtctgacatgatggaactcacttcctggaggccaagaaagacacttgcgggacaaaagggaaagagcggtggcttgcttagttccattcactgacaacccacaggagatgtccagtccttttttgatttattattttattttattatattttattttattttattttattttcacatggagttttgctcctattggccaggctggagtgcaatggcacgatcttgactcactgcaacctccacctctcaggttcaagcgattctcctgcctcagcctcctgcatagctgggattacaggcgactgccaccacagccaggtaatgtttgtatttttagtagagatgaggttttgccatcttggccaggctggtctcaaactcctgatctcatgtgatccgcctgtatcagactgccaaagtgttgggattacaggcgtgagccaccacacccagccttttgtatttttagtagagatggggtttcaccatgttggtcaggctggtcttaaactcctgacctcaggtgatccatccacctcggccacccaaagtgctgggagtacagatgttagccaccgtacccagcgagagtttcagtgctctatcggattccctgcctactccatgttgcatgtaatgttccacctcagggatgtttctctcctttctgtctccttcctcttctccttctccttttttctttctaatttttatttttttgagacagagccttgctctgttacccaggctagagtacagtggcacgatcccagctcactgcaacctctgcctcctgggttcaagagattctcctgactcagcctctcaagtagctgggattacaggcacccgccatcacacccagctagtttttgtatttttagtagagacgaggtttcaccatgttggccagactggtcttgaactcctgccctcaggtaatccacccgcctgtggccccccaaagtgctgggattacaggcgtgagtcaccactcccagccctgaatgatctttcctctttagtgtgttctcacaaccacctctcactgagctttcttgttttttgtttttgtttttgtttttgtttttgtttttggcagagtctggctttgttgcctatgctggagtgcagtggtgcaatctcagctcactgcaacctccgtctcctgggttcaagcgattctcccacctcagcctcctgagtagctgggattacaggcacccaccaccacacccagctaatttttgcatttttagtagacacagggtttcaccatgttggtcaggctggtctcgaactcctgaccttgtgatctgccagcctcagcctcccaaagtgctggaattacaggcatgagccaccactcccagccctggattatctttcctct[132 bp omitted]gcaagctccacctcccaggttcaagcgattctcccacctcagcctccctagtagctgggattacaggcgcatgccagcacacccagctagtttttgtatttttagtagagacaggggtt[132 bp omitted]tgccagggaataagatagaaaccattccctcaaccacattctagtcatggtccctattctcatgtttccacttctctctctttggtaataaatcaattaattgagaaacaagtagctaaatgttcatcttctgctagtctgcatccccttattttcccagagcctcccctaatgaaactgactttatttactgaacgcaggaaatgggtctctccagatcaggatgactttctgctgggaaatatttgtctttgcatcagtggggaaaaagaaagccgatgtcatgagtggaggctctgagaaaataagggctgtgttttcagtttagacccagctaagttgggagctgacatagatatgatgttgggtccaccctccacgggcaggttttcagacaaaggatccctggcaatcaggggacacctcaggtctgggctgagatgtgtgcagagggcctgggtcctcctgagcccctgcactggggggggaataagagacaggcccagcaaggggctgtccacttcctgtgggttcacagctgtggggacccaggcaggcggcagcaggctctgacttaaccacatccgtgcatctgtctgtcatggagggccatgtggtcacctgtcccacagctggagcacgcagagcaggcatcatggtgtccatcctcactgttcttctgtgcctcagtcagtggtggagagacgagggacaggaggggcactgggctgaggtggggagggtcccacagcagccttgttcaccagagagcctcagggctccagtggctactggtgctccaacaggaagggaagcagccacacctctgtgttccaaatcccccacaggaaactcttctccatggctgagtctgggccagaaagcccaagcacttgcaggtgagtctctgctaacctcccatgcctgacctcacactcagcacctggactctcatctcaggggcttctgaactgagggtgagaaaatcaagagggtctgtgacctgagctgggaatgaggagcgggggaggtctgtggaccccagcctgtggtttcttccagggaccctccccaaacccagcctctgggctgagccaggctctgtgattacctgggagagccccatgaccctctggtgccaggggaccctggatacccagggttactatctcaccaaggaaggaaaccccatgacctggtaccaacagagcccaccagagcccaggaacaagaccaacttcttcatcccatccatgagagagcaccatgcagggagataccactgtcactatctcagccctgcaggctggtcagagcgcagcgagcccctggagctggtggtgacaggtaagaggacactcaggggtcccagccccaggctctgcctgcaggaagggggtcagctctcaagggcatctccgttctaataactcagccctgggggatgatgtgggacgcgtgagccccatttaagacagtgtctccttctctcctaggagcccacagaaaacccactctctcagccctgccgagccctgtggtgacctcaggagagaacgtgaccatccagtgtagctcaagggtgggatttcacaggttcattttgattgaggaaggagaaaacaagctctcctggatgctggactcacaggaactctccaaggggctgtcccttgtccctggccctgttccctgtgggccgtgtggctgccagtcaccggtggatgttcagatgctatgggcattacacgaacttcccctgggtgtggtcggaacccagtgataccatggagatcctggtcttaggtatggatgtcttcctccttgccctatttatttttgagaacttactctcacggagccccatgtaggagggtggaacaagggaagtttgggactcctgagcccagagacactgagtgtgagagacagtgagacctgcagggccaggaggggagaaggaaggggtgtgggaggaaccagccctcctagtcccgactcttctttccctccaggcgtgtctaggaagccctccctcctgaccctgcagggccctgtcgtggcccctggggagaatctgaccctccagtgtggctctgatgtcggctatgacaaattcactctgtacaaggaggggggacatgacctcgtccagggctctggccggcagccccaggctgggctctcccaggccaacttcaccctgggccctgtgagggtctcccacgggggccagtacagatgctacggtgcacacaacctctcctccgagtggtcggcccccagtgaccccctgagcatcctgatcgcaggtgaggagcccagcaggttcagtcagggacccaggctccgcacaggccctgctgggggagcccaggtggtgatggccgggatgaggggtgggggtcctaagggacggagagacagacagagacaggggatgggcggggagggggagactcagagaaaacagagacagagacactgagggtcccagggagaggcctggggaggtgtcagctcagaacgaggtggggcagcccctcacccatccttcttctctccaggacagatccgtggcagaccctccctctcggtgcagccgggccccacggtggcctcaggagagaacgtgaccctgctgtgtcagtcacgggagcagttggacactttccttctgaccaaggagggggcagcccatcacccactgcgtctgagatcagagcaccaagctcagcagcaccaggctgaattccccatgagtcctgtgacctcagcccacgcggggacctacaggtgctacagctcacgcagattcttcccctacctgctgtctcaccccagtgaccccctggagctcgtggtctcaggtgaggccgctgaccctgtcctctctgagctcaaacctcagctcaggccctgcccccaggagagctcaggacgctaaggaaagaggggagtaaagggggagggtcggcaggggagggcccagcccatgagagggtggaaatagtcagggacctcctaatcctgggctcccaccccagagacctcagatggggctaaaggccagggagggctgaaatgagatatggagaaaccttggaggaatcatgcttaggctgagggtagaagatggaggccccacccactccccacctgggctcccctggcggccccaaaatactcagtgcatacctgagacgaaggggagatcatgcacctgctcactgcagcaatgcaggcaaattattcaacagcaaacctcgtgtgcaattcctttctgtcctttattttttatgtccacatatctagtttctctttctgtttctgaagatttcaaagcaatgctggcatttataatttacacatttaatttgttaggtagcgttatgatgtaaaataactgtgctctgattttctttgggattaaattaaatatgtgcattcatgatggagaataacttctcattaataatgtctttgtatccaatacatttaaaattaaactttatacagttagcagatgcttgaagttgtattcataaaaattgtggacattgtgaattttaagcattgttttactacttgaataatttgaaagtctttgattcctttctattttctaaaattagttacgtatggatgagaaagctattggtttgggtatgctaattttagttcctattaacttaccacagacacactccctttcaatcctttccgaaatgatctcttctgatttattgataataattacattaaccacaagaaaatggaggacaaacttgtttgtttctaaattatataatactcttctcacttcaaatatatatgtatgtgtttatatatactcacacactattatatatcttataatatatattatgtattatatatttatatatacactattatatatcttatatattatgtattatatatttatatatacccacacattattatatcttataatatatattatgtattatatatttatatatacccacacattattatatcttataatatatattatgtattatatatttatatatgcactattatatatcttatatattatgtattatatatttatattacccacacattattatatcttataatatatattatgtattatatatttatatatacacacactattatatatcttattatatattatgtattatatatttatatatactattatatatcttataatatataatgtattatatatttatatatacacacactattatatatcttatatattatgtattatatatttatatatacatactattatatatcttataatatattatgtattatatatttatatatatacactattatatatcttattatatattatatatttatatatgcacacactattacatatcttattatatatttatatgtatacacacactattatatatcttattatatattatgtactatatatttatatatactattatatatcttataatatataatgtattatatatttatatatacacacactattatatatcttatatattatgtattatatatttatatatacatactattatatatcttataatatattatgtattatatatttatatatatacactattatatatcttattatatattatatatttatatatgcacacactattacatatcttattatatatttatatgtatacacacactattatatatcttattatatattatgtactatatatttatatatactattatatatcttataatatataatgtattatatatttatatatacacacactattatatatcttatatattatgtattatatatttatatatacatactattatatatcttataatatattatgtattatatatttatatatacacactattatatatcttattatatattatatatttatatatgcacacactattacatatcttattatatatttatatgtatacacacactattatatatcttatatattatatatttatatatactcacactatatcttataatacatattatgcatacacatatgcataatacatattatctatacacatatgcataatacatattatgtatacacatatgcataacacatattatgtatacacacatatttacacctatgcatatatgtatgtatgtatgcgaatgtacctctgccacggcagggaaaggttctatcacacaactacagagcagttaggagaagtgtagacacaaaggaatgcagcaactgagggacatgttggcttaagtctcttcaactcctcacacacctcccccttttttggttgattctcaggagcagctgagaccctcagcccatcgcaaaacaagacagactccaagactggtgtgtaaggagatgctctcggttatggggctggcacagagggtcaggtcctgtgaaggggaggtgggtgccctgggtggacatccaggggtcccgggtgatgttgatctgccctgacctctgagacctcttggtccaccatccccagcctcacacccccaggattacacagtggagaatctcatccgcgtggctgtggctggcttggtcctggtggtcctcgggattctgctgctttaggactggcacagctagagaagtccccaagatgcagcaaggaggtaaatacatgagagaacaatgcacccttcagagtgccagagccttggcaatgaatctgatagtcctaggaggttctggaagaaagtctggaccatcattcgggaaaccgtctactgagaaagtcgagaaggggaggcttgggtcaggttcaggaagatgtctgggtgcctgtagagaacgcttcctccattaaacttccattaaatggcagtgctttcagtcctgctgttgtggatcctccgtgtctgcccctcccttcctttcgctctctgtgatgtgaaggcacgtcccccatggtgggtttgcatccacacccctgcgatcacgtgctctggtccactgtcatgtaatacatttgtctttgtttccaactaccgcattctctaaagtgaactattgattctccatcttttcagttctgagcatagatctggattaaataactggaataggtgggcagatttgtatttgggactttgaaacatgagtctgaggccaggcacagtggctcacacctgtaatcccagcactttgggaggctgaggtgggcggatcacttgaggtcagaagttcgagaccaacctggccaacatggtgaaaccctgtctctactaaaagatacaaaaattagctgggtgtggcagtgagcacctgtaatcccagctgctcaggaagctgaggcgggagaatagcttgaacccgggaggcggaggttgcagtgagccaagatcttgccactgcactccagcctgggcaacagagcaagactccatctccaaaaaaaaaaaaaaaaagggaaatatgagtctgaaatgatgccctagcaccctctctggaccctgaattcccttcactcttcatcggatgatacctgtgtactttgtccagaaatatcatctctcagaatgagcacactaacgctcgaaggctcagcctcatggtattctgttaaactggctctctgaaaaaattattttcttaagaaaactctgaacatataaagccccagatttatggtatttgctgattagtgtggtataaatacgtcctttatggccaacttcagggtgcccatatgacgccattgaatgcacagttgggaagtagtcaaaagaattgtcgttcacacgagtatgaaccagttgtaaagtttatttaaaggttataataatttctgcttcattcttatggtgtagtttcagtaaaattgtaatgtcaaaaatcatagcacaatggagggaaaagaaaaaaataggccgggtgtggtggctcatgcctgtaatcccaacactttgggaggccgaggcaggaggatcacctgaggtcaggagttcgagaccagcctggccaacatggtgaaacgctgtctctactaaaaatacaaaaattagccagacatggtggcgcctgcctgtaatcccagctacttgggaggccaaggcacgagaatcgcatgaacccaggaggcggaggttgcagtgagccgagatcactacagcctgggtgatagagcaagactcagtctcaagaaaagaaaaaagtagcaaaatcattttttggaaagaatattgaacatgtagaattttagtacattaatagtaagagtacaaattgctttaatcaattaaggaagtgtattggaattatctagttaaaaagaggaggcacatggctgtgacccttcttaattatgtacttaattatgtaccctagagataaatgtctacttatgtgtcatgatacactcacaactgttataggaatgctgttcctattagccaaagctataaaataccaaagtccacctacgaaaaaaataaacatagtgtggtaaatagactcagtggaatattacaaggtagtaaaatgcataaatgaaaataacaaacagcaccatacttcaattttcaagcataaagtcaagtaaatgaagtattatttgaaaatgtgtgcatggttatttcattacataaaggtcaaaaggagggtacatttattatttaggaaaacacacctaagatatctttgtaaaatctgtaaaatcaatagtactgtttcccctctttcattccttatcttgaaaatgcttgtctctttttctgccatggctttctaccttgcttgatatattacaattttgtaacctgcttatttcatcatatgtcataagttcacatgtatatcccatgaattattgagggtcttattcatttcaagtggcatttaggtttttaaaaatatcttttggcgaccaggtgcagtggctcatgcctgtaatcccagcactttgggaagc[137 bp omitted]aggaggctgaggcgggagaatggcatgaacccgagagacggaggttgcagtgagccgagatcgtgccactgcactccagcctggcaacagagtgagactctgtctcaaaaaaaaaaaaaaaagaaagaaagaaaggaagaaaaaaaaatcttctggcattaactattaagaaattgcactataaaaagagaatataatgcataagacggcaatttgaaaagattcagatataattttttcttatctagtaaatacttagtaatttgtctaatgcatgccttaaatacataccactttatgcagaggttgccatgagccgagatcgcgccgttgcactctagcctgggtggcagagcaagactccatctcaaaaaaaaaaaagaaaatctcacagaaggagacccagagcttccagcctcgcccagagtcttggctcactccctgtgtgtgtggaccctagggagcctcttctgttccccacagaggtggaaacttcctccttaataaccccttgatggtcccaggcactggtgaccactgagctttgctctctcttttttcttatggttccctgtctacttccagggctatcactttactttttgtgcattagaccatgaataatgttttagaaacattctatcaaatttctcagtgctaggaacaactgaggtttttgattgggtgcctcaaatgtctacccttactgtggagtccgacaacaggattctaacaagtcccaaccccttcatgccttaacctggtctggaaataaattatgtttaagccatcccataccccagccacatcaagccccacaaccactctgagaagtgagatttatagcaaaatgctccaaacaaggtaactaaggttcagacaagggatgttaatgtgtccatttacataaacaaaaaatggtagatgatcagctttccctttgaaatcagagtactaatctgactcattgttccctgaattttagaggcaggacctcaggaggagctaagaatcctaccccaggaaaattaccaatatcagaaaggaaacaatgacatcagtacagatcctacagaattcaaaagattctaagtggacattatgaagacattattcagcttagatgaagtggtcacatatcacaagaaaacaaactgtctaaaacaatctctgaaatacctagacattccctgaatcattgagttattaaataaaatacattttaaaattaaactcttttcaggaaataaacttcaatgtcccctagtgcactctccaaaacatgtagatgggaataaatactgttctgaaagacatttccctggaattacaaccattcaatatattttaaaaggcaatcataaaaatataaaaaggatatatcaggagaagaaatgtaaatggcctaaattccccacataaaaggcatagagtggcaacgtggataaaaagccaagagccaactgcctgctgtcttcaagagacccatctcacatgtaatgacacccacaggctcaaagtaaaaggatgaagaaatatttactaggcaaccaggaaacaaaaaaaaggaaggcattcctattcttatatcacatgaaacacactttaaatcaacagcaatcaggaaggacaaagaagggcattacaaaatgataaagggttcaatttgacagaagacttaactattctaaatatatatgcacccaaatttggagcaccccgattcataaaacaagttattcttcacctatgaaaagagttagacagccacacaataatagtaagggacttcagtatcccactaacaacgtcagatgaatcactaaaacagaaaactaacaaagaaattctggtcttaaagacaacacttgaccaattggacctcatagacatctacagagtactccacccaacaactgcagaatatagattcttcttatctgcacacacaaaaaacatatcatattctaagactggccacaaagcaagtctcaataaattcaaagaatcaaaatcataacaaggcacacaataaaaatagaaaaaaataccaagatgatctctcaaaactacagaaaaacatggaaatttaacaacttgtttctgaatgaatattaagagccatctatgacaaatccacagccaacatcatattgaatggtcaaaagctggaactgtaccccttgagaactcttgggtgaacaatgaaattaaagcagaaatcacaaaacattatttaaaattaataaaaatagaaacaaacttaccaaaacctttgggatgcagttaaagcagtgataagaggaaaatttatagcaatacatgcctcatcagaagtttagaaagatctcaaattagtgacttaacactgcatctagaggaactattaaaaaaaaggaacagtccaaacccaaggccagcaaaagatgagaaataactaaagtcagagagaactgaataaattgagaccaaaaagtccatacaagagataaataaaaccaagagtttttctttgaaaaaaaataaacaaaattcatagactgttagctagattaacaaagaaaaagagaaaagatccaaataaacacaaatagaactgacaaaacaatgttacgaacaatcccacagaaatagaaaagatcgtcaaagactattatgaacacctctatacaaacaagctagaaaacctagaagaaatggataaattcctggtaacacaaaatttatcatatttcaaccaggaagaaagtgaaaacctgaacagaccaataacaagttcagaaatttaatcagtaataaaaaccctactaactaaaaatagcccaggaccagatggattcacagccaaaatccaacagccatacaaagaagaactgataccgatcttactgaaacttttggaaaaaatcaaggagtgggggcttcttcctaactcattctatgaagccatcatcaccatgataccaacatctgtcagagacataatgaaaaaaagaaaactacaactaaatatccttaatgaacatagacataaaatcctcaacaaaatgctagcaaattgaatctgtcagtgcatcaaaagttaattcacatgatcaagtaagctttatttttgggatgcaaggttggttcaacctacaaagtcaacgaatgtgattcacctcataaacataattaaaaacaaaaactatatgatcatctcaatagatgcagaaaaagctttctgtaaaatccaacatcccttcatgataaaaactgtcaataggcatcaaaggaacatacctcaaaatattaagagccatctatgacaaacccacagccaacatcatattgatgggcaaaagctggaaccataccccttgagaaccgaaacaagaccaggatgaccactcccgccattttaattcaacatggtactggaagtcctagccaaagcaatcaggcaagagaaggaaataaaaggcattaaaattggaaaagaagtagtgatactgtctctctttgctgatgaaataattttatacatagaaaaccctaaagactctgtcagaaggctcctgaaactgataaacaaattcaataaagtttcgggattaaaaaaatgtacacaaattagtaacatttctatgcaccactaacattctagctgagaactaaatcaagaacacaattccatttacactagccacaaagaaaataaaatacctaggaatccatctaaccaagaaggtgaaaattctctacaaggagaactacaaaacacttctgaaagaaataagaaatgatacaaacaaatggaagaatattccatgctcatgaattaggagaacaaatagttaaaatcgccatacttccaaaaacaaattgcagactcaatgctatccatttcaaaatgcaatgtcatttttcacgaaattataaaaatttattctaaaatgtatttggcaccaaaaaaagagcctgaatacacataggaatcctaagcacaaagaacaaagcccaggcatcacattacccaacttcaaactatactacaatgctatagtaacccaaacagcatgatactactacaaaaacagacacatagaccaatgagacagaatagagaacccagaaatgaggctacatacctacaatcatctttgaaaaaattgacaaaaacaagcaatgtggaaagtaccctttcttcaataaatagttctgggataactgactactcatatgcaaaataatagaactggacccctaactctcactatatacaaaaattaacccaagatagtttaaagatttaaatgtaaaacctcaaaatattaaaattctagaagaaaacctaggaaatatccttctcaagatagactttggcaaagaatttatggctaactccccaaaaccaattgtgacaaagacagaaattgggacctaactcaactgaagagcttctgcacagcaaacgaaagtatcaacagagtaaacagataacctacagactgggagaaaatatttgcaaactatgcatctgacaaagttctaatatccagaatctataaggaatgtaaacaaatcaacaagcagaaaaccaaaaaacctcaattaagtatgacatgaacagacacttctcaaaagaagatgtacacatggccaaaaaacatatgaacaaatgcttattatcagtaatcatcagagaaatgcaaattaaaaccacagtgagataccatctcacaacaatcagagaagcagaagcaattactaaaaagttttttgttttttttaataacagatgctgacaagattgtggagaaaagggaacacttatacactcttggtgggaatgttaactagttcagccaatgtgataagcagtttggagacttctcaaataacttaaaatagaactactattcaatcaagcaatcccactactgggtatataccaaaaggaaggtaattaactatgtcaaaaagacacatgcactagtatattcattgctgtgcaattcagaatagcaaagatttgcagtcaacctaagtgctcaccaacagtggattagttaaagaaaatgtgctacatatacacatggaacattacatggccataaaaaataatgaaatcatgtcctttgcagcaacatgaatgtagcaggaggtcaatctcctaagtgaactaacccaggaacagaaaaccaaataccacatgttatcacttataactgagaaccaaacattgaatacacatgaacataaagatggaaacaacagataccgaggactacagatggggggaggagtagggaggtataggctgaagaaacacctgttggattctatgctcattgcctgggtgatggcattgttggaaccacaaacctcagagtcacacaatatgcctatgtaacaaacctgcatgcatacctttaatctacagtaaaggttgaagttatttaaaaataggaagaagaattaccctatacctaaagctaagatttttccctttgaatattcgtttcttcatcactgtagataagcagggaaagaaaaattattatactatactagccttttatgtgaccatgaggatttggggtaggtaggtggacagcttagataattcaccaggatattgatacaggctccatggctggaaataaccaaggatgagtgctgtgttttgagtggtctcccccagaaacgtttgttgaaatcctaacccctggtatgtatgaatgtgaattcatattatataaaaaggaataaatagcctgagcacagtggctcacacctgtaatcccagcactttgggaggccaaagcaggtggatcatttgaggtcaggagttctggccaatatggcaaaacttcatctctacaaaaaaaaaatacaaaaaaaaaaattggctgggtatggtggcgcatgcctgtagtcccagctactcaggaggctgaggcaggaattgctgaaacctggaaggcagaggttgcagtgagccaagatcatgccactgcactccagcctgggtgagacggcaagatattctgtcaaaaataaataaataaaaaacagaagaagaaatacaagaatgacagcaaactttgtattcaaaactatgaaagtaagaaataggtggaccaacatttttaaagtgctacaagaaaatatttcaaactagaatctttcaacctgaaaaggaaaacattttcctgcaataaaggtgccattaaaaatgtctcacaatttattacatgaagcattgttctacaataaatgttaagctcttgaagcaaagattaatgataccatttagtaacttgaaattcaaaaaagtggaagtatcccaagaggcaaatacgtgtgcaattattaaatgtttcatatcaacacccaaccttatgctgtctacataagctgcacttcaaatactaatccacaagatgtaaatattgaaagaatgacattacattgtcatgataatgcccagtgcaaaatatgcttctagtcagttgtatacatagaataggtaaatgtttgtaataaaaagtattcctcaatagaagtttcttaactcaaagaatgaaatatttcaccatgcacatacaaagaagagatatatggagatatgaagaggagtacttcataatgacaaagaggcaaattcataaataagacataataatcctaaatgcctacacacctaaagctggaacctcaaaacacattaaattaaaggcataattcaaaacataatcaatcacatccaaattgcagctagagatagcaacattcacctcacttccagaacaagtacacagaaaattattaagcatatgaaagacttgaaaaacatttgtgtaggcggcgggtgcataaggttgggtgttgatatgaaacatttaataatttcaataatcctagcactttgggaggccaaaatgggaggatcacttgaggccaggagtttgagaccagcctgggcaccatagtgagaccccgtctctattttttttaaataaagaaaaacatttgaatgatttttttcttaactgacatttagaaaacatccacctcaaatcttcctaatccacaaacttgtctagcacccctggaacattcaccaaaataaatttttaaatgctgaatcataggtaatatgatagatgaaacagttgaattaaattataaatgtacaacaaggaaatgctggggaaattatcaaatattttaaaattaataaacacacatagcaataaacaatgagtggaagaaaaacatttcaaagaaaggtggaaaatattttgtatcaattaaaaatgaaaacacatctcggcaaatgactggggatacagatagaacagtgttaaaggaaaataagcctcaaatgtctgtgttagaaaagaaggaagagctgagtaaataggtaactttcgcttgcagaaatactacacatcagcaaattaattccaaagtaacgtcgaggaaaaacataaaatggcaagcaaatatatacgtgcatatgtacgtatattcataaatgacaaacaggacagaaaaatcagtgacatcaattttgttccttagaagaaacaggaaaattgaccccaaaaaactttccaggccacatttggtcatgatggaaatattttggcacttcctggttaagctcaacaccaacttgcacccaaaaccaataatttcattcctaggtaaatatgtctaattaattcagcatatgtatgcaagggatcacacagaaacacgattatcaaggcccgagttataaaagagaaaatccggaaacaacacaaatgtccatgataaaaagagtggataattacatgttgataaagttatgtatggactattaaactgcaatccaaaagaataaaatagaactataaaattcaatatgtatatggtgtcatagaaacacaaatgtgagaaaaagaaagaaaaatacaaaatttatattttttaaaatttgaaacaactatatatgtgagtgcttagggtgtgtgtgtgtgtgtgtgtgtataaccatatgtatataaacgcacacatacgcacacatatagaatgtcccggccaggcatggtggctcacacctgtaatctcagcactttgggaggctgaagtagacagatcacttgaggttaggagttcaagaccagcctggccaacatggagaaacctcctctctactaaaagtacaaaaattaggtgggcgtgatggtgggtgcctgtaaatccagctacttaggaggctgaggcacgagaattgcgtgaacctgggaggtggaggctgcaatgagccgaggtctcaccactgcattccaaactgggtgacgaagtgagattgcgtctcaaaaaaaaaaaaagttctaaaagttgtgacttgggtgtggcagattgtgacatactgccagctgctagaaatgctggggcaggaggattgcttgaactctgaagtcaaagaacagcctggggaaaatagcacatgaagaagagtttgaatctcagataaaaacaacaaaaatacatcaaaagtctttaatgtaagccaagcattcagtcatctcctgtatgagagattggatctgagacgtgttttgagttggttatagtgaaggatgcaaggtgtcaattctagttggaacaatttccaggaagccatgttccgctcttgaccaaacagccactgggcctcatgcaaggtagaaatagcctgcatacgtcatcctcccatgatgtggtcagcatgtaaactgcatgagcccctcacaacatcctgtgtgctgctgaactgagctggggcgcagccgcctgtctgcaccggcagcaccatgtcgctcatggtcgtcagcatggcgtgtgttggtgagtcctggaagggaatcgagggagggagcgctggggtggagatctgggcctggagtggagatctgggcctggagtggagatatgggcctggagtggagatataggcctggagtggagatatgggcctggggtggagatatgggcctggagtggagatatgggcctggaactgtagatatgggcctgaagtagagatatgggcctggagtagagatatgggcctggaactgtagatatgggcctggagtggagatattggcttggagtgcagatatggacctggaattgagatacgggcctggaggtggagatatgggcctagagtggagatatgggcctggaggtggagatatgggcctggaactgtagatatgggcctggagtagagatacgggcctggagtggagatgttggcttggagtgcagatatgggcctggaatggagacacgggcctggaggtggagatacaggcctggaggtggagatatgggcctggagtgtagatatgggcctggagtagagatataggacggaggtggagatataggcctggagtggagatatgggcctggagtagagatataggacggaggtggagatataggcctggagtggagatatgggcctagaggtggagatatgggcctggagtggagatatgggcctggaggtgatgtacagatggatcatccatcatgatctttctttccagggttcttcttgctggaggggccctggccacatgtgggtgagtccttcccccaaaccttaggttgtcatctccccacataagatgatgctcctgaaacgggaggcaggcgacacagggggttgactgatgggctgaccatgggaagccatgtgggaatctctcatgaactaggaaaaggaagccaggggaagcttcgccacagttctgtcctagccctccccggcctttctttcccttggctgagtctgtggggacccagggggagactgaagtgctcaaaggagtggtgtgcagggaggaagtggtgtcaccggcagaggaagggagagaagcagtgcaaggaacaacaggcctctgaggacaagagcataactcacaccctccagcgtttccatgacggtaggggctgcaatgtggctgctgtcattctacctaagaggtgggggaaccacagtcatgaccctgacattccagatcttctaataggggctcagttgtttattatggttcatgcattagctgatcatgccctccatcctgtgtctaccttgtgttcttttatgtaagtaattttgcagtgttaaaatctagtaagagtcgcttcttcagcacctgctcaaagttctcagctgacacttgctgtagggagacgccatgtctatgcgggatgggtccttcctgtagccctgggcacccaggtgtggtaggagccttagaaacgtggaaatgggagaatcttctgagcacagggagggaggggcggctccacatcctcctctctaaggtggtgcctccttctcccccaggtggtcaggacaagcccttcctctctgcctggcccggcactgtggtgtctgaaggacaacatgtgactcttcagtgtcgctctcgtcttgggtttaatgaattcagtctgtccaaagaagacgggatgcctgtccctgagctctacaacagaatattccggaacagctttctcatgggccctgtgaccccagcacatgcagggacctacagatgttgcagttcacacccacactcccccactgggtggtcggcacccagcaaccctgtggtgatcatggtcacaggtcagaggctttctgtctgggcttctcactgtcccacctcctgaatcccagagcttctggtgggggcgtccatcagggtccaatcatccaggccccgactgtatttggggtaaagggggattcagtacagagaaatagttgctgtggtgggaagaataattgtccccagtgatggctacatggtaatccatgaaccctgtgactatttatgttatagggcaggggactgaagaggaagatggagctcaggttgttgatgagttgaccttgcgatggggagacagcctggactgtcctgctgtgctcagagtaatcacaagggtcctcatgagaggaggaggaagaggaaagtggggttagagcaacgtcgtgggagggagactccatcagccacagcgggctttgaagatgggggaaggccatgagccacaaaggcaggtggcctctaagggctggagaagtcaagggaactgattcttccctgagtctccagaggaaacacagccctgcagatgccttgattttagcccagagagaactgggtccgatttctgttctccagaagtggaagaggtcattgtattctctcctgccccatgtttgtgacaattttctccagcagcaacaggaaaccaacacaggaacccaggtgaagcacaggttaagaaaccaaacaaggagaaggttggctacactgattttagcatgggtgggatactgatgctaccaccaggctcgatccacatagggaggggttgatgctcctggaaccagcaccaggggccaccctatggaagctggggccatggagaaggcacagacatgaaaggagaggctcccaatccccatcaggaacagggacactgatgcctgccttactgatgagttcgtacctcctgccggcctttccaatctgtccaaaagagattgattcaggctgctaagagcctggacatgcagcctgtcatggttcctcttccacccccacataaacaccaggaaagagattagtgggaaacagatacaacagcctaagaggtgacactgagcacagtgggaagggaatcagggctactagagacagagagacagggaagagggagggagacagatggagggacctgcaacaggggttatgggcacaaaagaacacggagacacagacaggaaggagagagatagacaccatggaggggaagcctcacttatttcaggtcccatgaatgggatgagaaagggagacgccttctgaactcacaacctctcttcttaggagtccacagaaaaccttccctcctggcccacccaggtcccctggtgaaatcaggagagacggtcatcctgcaatgttggtcagatgtcaggtttgagcgcttccttctgcacagagaggggatcactgaggaccccttgcgcctcgttggacagctccacgatgcgggttcccaggtcaactattccatgggtcccatgacacctgcccttgcagggacctacagatgctttggttctgtcactcacttaccctatgagttgtcggctcccagtgaccctctggacatcgtggtcgtaggtgagagaatacagacctgcctctcacccttgctgggagatggagtgaatgatctaggactggaagccccaggtggtcatgaggaagatgagtgtggggttcctatggagagaaagtgacttggtgaggtctgtaccaacaaaggcagagaaacaggagacacaagtacagacctcatgtcataacatagaagccagacacaggggccatacaaggtgttagaaaaagagataaagaggtaaagaagacacagagagacagacatatcccagagagaggtgtccttctatgctgactttgttcagagaccaggcacaggttagaaggttccattctgttttacctctacaaagtgttctctcccaggagaacccaaagagacacatctatctggcctgagttgggccatgtggccccaggctggtggcacctacagatgttgtgtttattcttaaacctctgccttccgtgcagtggagctgtcatcgtcccaggacaccatggccccaggtgagggagcagaacaccaacccctgtatgctgtgagttcctggagtccccatactggattctgaggctcatattcaaatagcaccacatgttataggattactgagaacaaaagcccacagagagacacggagtgaaatcagggaaatcaaaaagcaaagacatgaacacacacacagaatgagccagaagaagggaattgagagactcacagacacataaagagatagaaaaagagggcagagaagtggagcgtatgatggaaggaagcagagaaaagccctaaaatcagagccctgagggaggggcacaaagacagggaaagataaagatgtgaggatggattgcagagactccaaaagggaactagagagactgagaggcagagaaagacaaggagatggagagagacagatgatagatggacagatagatatagatagatgaaagataaaaggtagatgatagataatagagagacaggtgatagacaaatagatgatgaatgactgatagatgatatagatagacaagtagaaagacagacagatgatatataaatagatatagagagatagaaagacagataaacacatgatgatagatggatagatgcatacatacatacattgattgatagatgatagataacagagagataggtcatagatacacagatgatgatagatgatagatacatacatagataaatgatagatcgatcaatagataatagatagaaatatgcagaaagttatgagcaagacagaaagtgagagactcagaattaaagaaagaggaagatcaagtcaaccagtccaaggagggtcagagagaataaaatggtacaaaaaaagaaaacatagctagggatggagaagtgaggtcagagacctagagagacagagaaggtggaaggaggaaatagacatgaagagagatgggggtggagggtgagagagagaaagagagcattaagtcatagagcaggggagtgagttctcagctcaggtgtgaggagagctgtgacaaggaagaacctccctgaggaaaccacctcttcttcttccaggtctatatgggaaaccttctctctcagcccagccgggccccacggttcaggcaggagagaatgtgaccttgtcctgcagctcccggagcttgtttgacatttaccatctatccagggaggcggaggccggtgaacttaggctcactgcagtgctgagggtcaatggaacattccaggccaacttccctctgggccctgtgacccacggagggaactacagatgcttcggctctttccgtgccctgccccatgcgtggtcagacccgagtgacccactgcccgtttctgtcacaggtgagaaaacaccatgcctgtcccatgtcttgtgatcctagagccatagctgaggagcttcctgctgatgatggagagaagcatggacagatgccgagacagaacacacagcatgggtgtaagggcggggtcagggcgcaggatggcagacagggcacctccaaaccctcctgtatggcctgcaaggatgcccttgatcagggttccaggcacccaggcagatggagaaagaggtcagaacagacccagaggagggagactgggctctgcctggggagatcagaggttctctcagcccctcaaccttacccacttcccagaagcccatcctggcctgtcacccacagagagatgtcatcaccagcaacgcctacacccttttctttttgtttgaagaaatatttattgaggtgaaatatacctatgtaatttaccacctttaccatttttaagtgtgaagtctactgttcataaatacatttataggctgggcacggtggctcacggttgtaatcccaacactttgagaggccaaggcaggtggatcatttgagatcaggggctcaagaccaccctggccaacatggggaaaatccatctgtactaaaaatacaaaataataattataatgataataattagccgagcatggtggcacatgcctgtagtcccagctacttggtagggttgggcaggagttgcacttaattgcaggaggcggaggttgcagtgagctgagatcatgccactgcactgcagcctgggcaacagagagagacactctctcaaaattaattaattaattaattagtattcttttttttttaccctccacccttcccttcctggcctctggtagccaccattctactctctacctttgtgagatccaccttttagctcctgcatatgagtgagaaatggaaatacttgtaatgacctccagttccattcatgtggctgtaaatgacaggatgttactctttctatggatgagttgtccctattgtgtgtgtgtaccacattctctccatccattcacccactgatgggcaggtaggttgatccacatcttggctactgtgaacactgctggaacagtcatgggagtgcagatgtcacttcgatacgctgatgtcctttcctttgggtttacacccagtcatggaattgctagatcctctggaagtgtctttttacattttgttttatggtttttgtttttgtttttgttttttttagactgtttcactcttgttgcccaggctggagtgcagtggcgccatctgggctcactgcaacctccacctccaggattcaagagattccccagcctcagcctcccaagtagctgggttactggctcccaccaccacactcggctaatttttatatttttagtagagacagagtttcgctatattggccaggctgctcttcaactcctgacctcaagtgacctacccacctcggcctcccaatgtgctgggattacaggcatgaaccactgtgcccgacctcattttattttttgaggaacttccatactcttctcctctgtaatggctgtactaatttacattcgtatcagcagtgtaccagatgcaaccctggttgactcagcagagcaagagacgtgcagtaagagagaatttagcttatttatgcacacgacacttccactcactcactcgttcagccaatgccccatgctcaggctgtgcagtgtggaatcttttcctattgttgccataacaaatttccacaagcttcgtggatgaaaacatgtttttcttaattatctcacagtgctgtaactcagaagtatgaactgcatttcactgggctgatatcaaagggacagtaaggctggatttctttttaaggttccaagcaagaatctgctccttaacgtttcccagctcctagaggctcccacgttcctgggcccctggtccccttcctccttcctccttcctcaaagcccacaaaggctggtcacgtctcacatggcatcattcagactcttcttctttacccacacctttttctctgaatcctgctctgccttcttcctcatcttttaaggactttgggattctattggggtcaccaagataatccatctcaatctccctaaaatcatccagcgtaccctctttttaagttcagctgattagcaaccgtaatgccatctgcaatcttcattcctcctttcctgtaaaataacatattcacaagctatggaggctaagacagggacattttgggggtggggcagcattctcctgccttccacaaatggtaaacaggatgcatttggcctctgctcttgggacgctgatattgcagatgggtaaatgcgagggcagagaatgaatgcacaagggtaccaataaatgaatgatccattgggaagcatctgtgcaccaaatctggggttttttgtgtgtgtgtgtgttttttgttttctttttttttttgagtagagtctctctctgttccacaggctggagtgcagtagcacaatctcagctcattgcaacctctgcctcctgggttcatgcaattctcctgcctcagcctaccgagtagctgggattacagctgtgcgccaccacactcggctaatttttttggtatatttttttagtagaaatgaggtttcaccatgttgtgcaggctgtctcaaactcccaatctcaagtgatcccaccgccttagcgtccctaagtgcaaagattacaggcgagagctactgcgcccagccaggatttaaaataagtaatagataatgctgagtatataatttcaggtgacagagaaggtctcactgatcagataatatttgtgaccttaatggaaaaaatggattcaacccttggaagattggcggaaggattttccacactgagctctcagccgtgaaggcacaaaggtggaaacattcttagttcaaggaagaggctctgcctcaaatgctgggaatgagatggggagaatgacaagacaactgtagagagatggagagcacactgggtacacaggaaactaaggaggaacaaggagcatgtttttgatactcacagcccttggattcaactcagagctaactaggaatccctacctgattaacagtgaccgacatgaaaataagggaggcccaggtgcgtaactggaatctaggagaccgtggaaaaggcaattcccgccccactggtgaaacgtagggttgatttacacactaaatgaatgaaagatggatataagctatgcttgtgaggtagaatcatttgcagggagggcttgctgggtttgatttttcctagtagtttaatccttgtttcattaatttctttctgagatgtgttttttttctacatctaaatcaatacctggcagaggagcgatagacacatgaggggtggtgcaaatgaagggacctagtataatataatatacaagactgtggatgggggctcacacctgtaacccaacactttgggaggccaaggcgggtagatcacttaagggtaggagtttgagaccagcctggccaacatggtgaaaccccgtctgtactaaaaatacaaaaattagcctggtgcattggcacctgcctgtaatcccagcgactggggaggctgaagcagaagaatggcttcaaccctggaggcagaggttgaactgagatcgcatcactgcactccagcctgacacagggggactctgtctcaaaaaataaaaataaaacatacataattatgacacacagaaattacaaaggcaactggataccaaccatcatttttctatttctctgtgtttaattctttgaccctttatcttatccattaaacaatcaggttaaacctcttccttatttggctttctgtgagcttgggatcatatggaaaatgtgaaagcctcctgaacccaccagcacaggtcctggaatagagaacgtgctctgttcatggcataaaacttgccccttcacccaaatcccccaattcatctctacttccaatcacctatggagatacagatagatcatggggaggtaaacactaatactctttggagtgagctcagatcttggactcagagaccagtgccagcactagcccctggtcacatttcgtactaactcacagaaggacaggctgtattgaaacaataaacgacggagagggcggtccttccccgtgcttctcgggtggaatagcagcctaatatatgtctcagcagatcacaaaaagtagcatgttgttcctgggctacatcattatttcatggctgtttgatttaagtcagttctacttcactttttttatcttgatttcattttttctttcttttcttggagaatgtaatttttttgagtcaagagggttgtggtggtagaaactgtaaagcacattcgctgtgtatcaatcccaatccagtcttcccagagaagattctaaacacctcctggaatgcacctgggcctataccaattcctatcactcaccgtcactccagggagacagaacacacagagaacacattacacaggcaggttcattactaacagataagcagcgagtgacaacagaaacctacatttcaatgtgagccagtccctcaaggctcagaaaagctgctcgagacatgtggagtcaccccatatgcagtgtatctgggggaaatcaaaaagcagcccagcctgggttttgtaccctggagccacaggaagcactcagctaaagcactgcatgacgtcctcctccaggaagaacaggaagacagcccaggctgttctgggatgttcctcctgatctcaggacgttgctgtcttagtccatttttgttgctctaaaggaacacttgagcctgggtaacttctaaagacaagaaatgtgtttgcctcacagttctgcaggctgtactggaagcatggcaccagcatctatttcttgtgacggcctcaggctgctcccactctggcagaagggaaggagggtctgtctgtgcagagaccacagagatcacacggcaagagagggaccaagggggagggggagcgatggagcttccaagctcttttaacaaccagttctccaggaactaatagagggggaacttgctaaccccgtctccttggaacagcattgatctgttcatgatggatccacctccatgacccaaacaactcccaagaggcccaacctcccactctgggggttacatttcaatgtgaggtttgaaggggtcaaacatctaaactaaagcagttgtatcctcagcacgttctatggttactacaactgagaaagcaggaggaagctaggtctcccgccatctgggtgcttgtcctaaagagacgttgtatgtggttacctgtcaatcaagaaatgtgagacaattcatatagaggaactgctatgattagcttcttattggtgtcttgtcttcctccaggtaactccagaaacctgcacgttctgattgggacctcagtggtcatcatcccctttgctatcctcctcttctttctccttcatcgctggtgtgccaacaaaaagagtaagtctcacgaagcagaagccagagagctcagggccatgtggggaagcaggatgggagcactcaggtgtgtgttcctcacagactggatggtccctggcccaaggcaggagccacagaggcaggactttctagagagagcaccagactccctgcctctgccttcagctcacagaccattgcctgattctgaaccgtatcctcacatcccctgcagccactcacatccaggagaaggttccatgacaggcagaaagtgggacacagaatcaataggatgggaactcagagctatacatgggatggatccttgagctcagagagatagaatgtctgagtctgctgttggcaactgagggacctcaggcacctatggcctccccctgtatgttggtatctgcttatgaaatgaggacccagaagtgccctccgagctgttttgacgacttccgtcttctacagatgctgttgtaatggaccaagagcctgcagggaacagaacagtgaacagggaggtaggtgctcctccgcccagcctcgtggctagtcttattcccaaagagtcctggaaaatgtgagcaccctccctcactcagcatttccctccctccaggactctgatgaacaagaccctcaggaggtgacatacgcacagttgaatcactgcgttttcacacagagaaaaatcactcgcccttctcagaggcccaagacacccccaacagataccagcgtgtaacacggaacttccaaatgctgagcgcagatccaaagttgtcttctgtccactagcaccacagtcaggccttgatgggatcttctagggagacaatagccctgtctcaaaaccgggttgccagctcccatgtaccagcagctggactctgaaggcgtgagtctgcatcttagggcatcgctcttcctcacaccacgaatctgaacatgcctctctcttgcttacaaatgtctaaggtccccactgcctgctggagagaaaacacacttgcttagcccacaattctccatttcacttgacccctgcccacctctccaacctaactggcttacttcctagtctacttgaggctgcgatcacactgaggaactcacaattccaaacatataagaggctccctcttaacacggcacttagatacgtgctattccacctttcctcagagtatctttcagccttctgtcagcagtaaaacttataaattttttttataatttcaatgtagttttctattcttcaagtaaacatgtctgccctcatggtttcttcaatgggactcttttcttgcctaaggcttccggtgttatcattaccacgtccacataaccccatctgttctccgctgggttctcagccctggactctgagcttctggaagcatggtggagcctgaattgtctctgagactccaatttccatccaaagatgcagcacataggaggttccaaggatggtgaatcagatgaacaagtgatattcttactctctgcagatctggaaagctggcagagtcattccacgatgaaacatttgtagagtcataggccttgttagtctcatctccacagggacacgtatcaacacatcatctttcatactactataaatagacagtcactcctccatatctctggggtttacacatgtttattgaatcagcaataaatcaaaaatattttgagaaaaaaaatccccgaagtttcaaaaagcaaaaaactatgttgaatcgacacaaattgagtggcgtgtaggctgtgtcaggaattataagtaatcaagagatgatttcatgtatacaggaggatgtgcatgggttctatgcaattgctatgctattttttttttttttttgagacagtctcactctctcacccaggctggagtgcagtggcgtgatctcaactcactgcaacctccgccttccaggttcaagcgattctcttccctcagcctccccagtagcctcccctaggattacaggcacgtgccaccatgcacagataaatttttttgtgtgtatatttttagtagagatggggtttcagaa[136 bp omitted]gattttggtatctgaatggggatcctggaaccaatcacccaggtatagtgaaggaccatggtatataatttttatttgtcaatcttaaaaataaagcataaaaaatttacaacaacaagataaaaaataagaagtgtttttatagtgtgaggataagtttagatttattttttcctacgtgtaaccctatggtcctgtgttatttgttgagaaaatattctattccaccttaaactacatggcagcctttgtcaactataaagggactgtgtatccacagatgtattttagacacagttttctgtccagtggttctctgtatcccctctcatgaggatgctgcattttatataaacttatagaaccccttaaaatttggtaacctgagtcctctgatttgttattataggttatttagtttgctttttttttttttcttgagacagactcttcctctgtcacccaagctggagttcagtggcttgagctcagctcactgcaacctccgtctcccaggttcaagctattctgatgcctctggtttagtagtagaaactcaagcaggaaaattagaatggcttcttgtcacaattactctgataatgttaataatacctgttagacattttgcacattacatatgaagaagagtttgaatctcagataaaaacaaaaatacatcaaaaatctttaatgtaagcacagaattcaatcatctcgtgtatgagaggttggatctgagacgtcttttgagtctggtcgtagtgaaggacgcaaggtgtcaattctagtgagaacaatttccaggaagccatgttccgctcttgagcgagcacccactgggcctcatgcaaggtagaaagagcctgcgtacgtcaccctcccatgatgtggtcaacatgtaaactgcatgggcagggcgccaaataacatcctgtgcgctgctgagctgagctggggcgcggccgcctgtctgcacagacagcaccatgtcgctcatggtcgtcagcatggtgtgtgttggtgagtcctggaagggcatcgagggagggagtgcggggatggagatcggggcccagagttggagatataggcctggaagtggagttatgggcctagagatggagtgatgggcctagaagtggagatctgggcctggagtggagatctgggcctggagtggagatatgggcctggaggttgagatatgggcctgcagtagagatatgggcttgtagtggagacatgggcctggagatggagatatgggcctggagatggagatatgggcctgcagtagagataggggcctggagtggagatatgggcctggagtggagatatgggcctggagtggagatatgggcctggaggtggagatatgggcctggaggtggagatatgggcctggagtggagatatgggtctggaggtggagatacgggcctgcagtagagatatgggcctggagtggagatatgggccaggagtggagttatgggcctagaggtggatatctgggcctggagtggagatatgggcctaggaaggagatatgggcctgggtgtggagatatgggactggagaggtgatatgggcctggagtggagatatgggcttagggtggagatctgggcctggggcggagatatgggactggattggagataggggcctagggtggagatctgagcctggattggcgatatgggcctagggtggaaatatcagcctggagtggagatatgggcttggggtggggatatgggcctggaaactgggtctctgcacagccgacagccctgttcttgggtgcaggtaggcactgagggtgagtttaacttcagcccaggaagggcctggctgccaagactcacagcccagtgggggcagcaagggaggcctggtttgcctgcagatggatggtccatcatgatctttctttccagggttcttcttgctgcagggggcctggccacatgagggtgagtccttctccaaaccttcgggtgtcatctccccacataagaggattttcctgaaacaggagggaagtcctgtcggggagtctctcataaactaggaagagaggaccctggggtgctcagcccacatttctgacctcgcctccctggcctctcaaccccttggcagagtcaagttctgtggggaccagggttagactggggtgctcaaagctggggtgtgtggttgggaagtggtaggaacagcagatcctctgaggacaaaggtgttactcacacacttcagcgtttccatgatggtaggggctgcagtgtggctgctgtcattctaccagaagaggtgggaaaccacagccatggccctgacattccaaatcctctgatgggggctcagttgtttattttcgttcaggcatccgctgatatccattcacaaaggacatgccctccacctcatgtctaccctgtgttgttttatgtgagtaatcttacagtattaaaatctagtaggagtctctttactcagcacttgctcaaagttctcagctgaggcttttgttgtagggagacaccatgtctttgcgggatgggtccttccttcagccctgggcaccaaggtgtgatagtagccatagaaacgtggaaagcgaggagaatcttctgagcacagggagggaagggcagttccacatcctcctctctaaggcggcgcctccttctccccaaggtggtcaggacaagcccttgctgtctgcctggcccagccttgtggtgcctctaggacatgtcattcttcggtgtcactcttatcttgggtttaacaacttcagtctgtaaaaggaaggtggggtgcctgtccctgagctctacaacagaatattctggaacagccttttcatgggccctgtgacccccgcacacacagggacatacagatgtcggggttcacacacacactcccccagtgggtggtcagcacccagcaaccccctggtgatcgtggtcataggtcagagggctcctgtcttggattctccttgtcccacctcctgaatcccagagcttctgttgggcatgtccttgagggtcccatcacgcaggccctgactgtatttgtggtaaagggggattgaatacagggaaatgggtgctgtggtgggaagaataattgtccccagtgatgactacattctaatccctggagtctgtgactatttatgttataggggaagggactgaaggggaagatggagctcatggggagacagcctggactgtcccactgggctcagtgtaatcacaagggtgcacatgaaaggaggaggaagaggggagtggggattagagcagtccagtggaagtcttcaccagctttgaaggtggaggaaggccaagatccatgaatgcaggtggcctatagaggctggaaaagtcaaggaactgattctccagagtctccagagggaacaaagccctgcagatgccttgattttagcccaggaaaaatagggtccaatttctgtctccagtactggaaggtgtcagtgtggtctctcctgctgccatgcttctgataattttctacagcagcaacaggaaaccaacactggaacccaggtcaaggacaagttaagaaacaacccaaggaaagccaggcatggtggcaggtgcatgtaatcctagcgactcaggaggctgagggcaggagaatcacttgaacccaggagacagaggttgcagtgagcctagaccacaccacttcactccagcctgggtgaaggagtgagactctgtctccataattaattaattaattaaagaaaccaaacaaggagaaggttggctaccctgagatcagcaagggtgggatgatgatgccaccaccaggctccatccacatagggaggggttgatactcctccaaccagcaccaggagccagcctatggaagctggcaccatggagaaggcacaggcatggcaagagtggctcccagtccccaccaggaacagggtgtgtggacactggtgcctgccttattcatcagttcataccttctgccaaggattgcaattcatccaaaagagattgaaccaggctgataagagcctggatgtgcagcctatcctggttcctctttcacccccacataaacagcaggaaatacattagtgtgaaatagatacaacaccccaagagatgaggctcagcccagtgggaagggaatcagaggctactagagacagagggacagagaagagggagggagacagatggaaggacctgcaccaggagttaagggcacagaaaagaacatgaagacacagagaggaaggagagagacagacaccagcaaggggaagcctcactcattctaggtgccatggatgggatgataaagagagacaccttctaaactcacaacctctcttcctaggagtccacagaaaaccttccctcctggcccacccaggtcccctggtgaaatcagaagagacagtcatcctgcaatgttggtcagatgtcaggtttcagcacttccttctgcacagagaagggaagtttaaggacactttgcacctcattggagagcaccatgatggggtctccaaggccaacttctccatcggtcccatgatgcaagaccttgcagggacctacagatgctacggttctgttactcactccccctatcagttgtcagctcccagtgaccctctggacatcgtcatcacaggtgagagtgtccggacattctcattgtcattgggatgcagagtgaatgatccacgacttggaacccccaggtagttgtaaggaagatgagcttggtattcttatggagagagactgacttgctgaggtttgtaccaacagagacagagaaacaggagacacaagtacagaccaggtgtcataacagaggacagacacaggggccatacagggagttagaaaagacagaaagagttaaaagagacagacagacagacatgtcccagagagaggtgtccctccatgctgactttgctcacagacctggcacaggttagaagtttcatttctgttttacctccacaaagtgttctctaccaggagaacccaaggacacccatatttatgacctgagttgggccctgtggcctcaggccttgtggcacctacaggccatgtttattctgacacctctgccttccatgtaatggagagtaatcgtcccaggatatcatggccccagaacaccaacccctgtatgctgtgtgaacttgtggtctccagactggattctgtggctcacattccaaataaccccacatatgaaaggatcactgagaggcacagagaaaaatcaggaacaccaaaaagcaaagacataaacacacagagaatgagccagaggaaggagattgagagactcacagacacataaagagagagaaaagagggcagaggagtggtgagaatgatggcagggagcagagaaaagcactaaaattagagtcctgagagagaggcacaaggacatagaaacatggagatgtggggatgaattgcagagattccaaagagaactagagagaccgagaggcagagcaagacagatgatagatggatagatatagatagatgataaataggtagatgatagataataggttaaagatacatagatgatgattgattgattcattaatagataatacatagagatgatgatgatgaagacagataatacgtacagatagagaggcagacagaaatcatagagagagagatgatacatacatataaataacagatgattgatggatagatagacaagtgatagatacatagatgatatatagatatagatgacaggtagagaatttgtagataggcaccgaatagataaatagatagatcgacagataatagatagaaatatgcagaaagttatgaacaggacacaacgtgagaaacttagaatttaaaaaagtaacatcaagtcaaccaatccaaggagagtcagagagaataaaagaatccaaaaagggaaaacatatctagaggtggggaagcgaggtcagagacctagagagacagagaaggtggaagaaggaaatagacatgaagagagatggggtggagggtgagagagagagagagagagagcattaggtcatagagcaggggagtgagttctcagctcaggtgaagggagctgtgacaaggaagatcctccgtaaggaaaatgcctcttctcctccaggtctatatgagaaaccttctctctcagcccagccgggccccacggttctggcaggagagagcgtgaccttgtcctgcagctcccggagctcctatgacatgtaccatctatccagggagggggaggcccatgaacgtaggttctctgcagggcccaaggtcaacggaacattccaggccgactttcctctgggccctgccacccacggaggaacctacagatgcttcggctctttccgtgactctccatacgagtggtcaaactcgagtgacccactgcttgtttctgtcacaggtgaggaaaccccatatctgtctcatgtcctatgatcctagagccttagctgaggagcttcctgctgatgatggagagaagcatggacagatgcagagagaagacgaagcttgggtgtgagggagggatcagggcacaggatggcagacagggcacctccaaaccctcctacacggcctgcatgaaggcccgcggccagggctccaggcacacaggcagatggagaaaacggtcaggagagacccagaggagagagactgggctcagtttgggaagatcagaggttccctcagcccctcaacattacccatttcccagaagcccatcctggcctctcacccacacagggatgtcatcaccagcaacccctacaccctttacttttgtttgaagaaatatttattgaggataaatatacctatatagcttaccacctttaacattttttttttttttgaggcagagtctagctctgtcccctatgctggagtgcagtggcacaatctcagctcactgcaacttccgcctcctgggttcaagtgattctcctgcttcagccacctgagtagctggtgctacaggcgcgcaccaccacgccaggctactttttgtatttttagtagagagggggtttcaccatgttggtcgagctggtctccaactcctgaccacgtgatccacccgcatctgcctcccaaagtgctgggattacaggcatgagccaccacgcccagccacatttaccatttttaagtgtaaagtctagtggtcataaatacatttatatatatatatatatatatatatatacacacacacacacatatataaacatatatatatatatatatatatatatatatatatttttttttttttttttttttttaccctccacccttttattcctggcctctggaagccaccattctactctctaccttcatgagatccaccttttagctctgtatatgggtgagaaatgggaatctttgtaatgacttccagttccatccatgtggctgcaaatatcaggatgttattctttctatggatgagtagtctccactgtgcgtatgtactacattctctctatccattcatccactgatgggcaggtaggttgactccacatcttggctactgtgaacagtgctgcaccaatcatacgagtgcagatatcacttcgatatattgatttactttcctttggatataaacccagtagtgaaattgctggatactatgaaagttctctttttagttattcgtttgttgttttgtttttgtttttgagacagtttccctctgtgcccaggctggagtacaagtgaagtcatcttggctcattgcaacctccgcctcctgggttcaaatgattttcctgcctcagcctccctagtagctgggattacaggtgcacgccaccatgcctggctactttttgttttttttagtatagatggggtttccccatgttggctgggctgctctcaaactcatgacctcaactgaggtgcccgcctcggtctcccaaagtgccgggattacaggcatgatccacctcacccaacctctttttagttctttaaaggacttccacacttttctccgtaaaggctgtactaatttacactcctaccaacagggtattagggttctcctttctctaccactttggcaggatttcctttgcctgtcttgcagctaaaagccattttattttatttcattttattttgagatggagtttcgctcttgtcacccaggctggagtgcagtggtgcgatctcggctcaccacaacctccacctcccaggttcaagcgattctcctgcctcagcctcccgagtagctggaattacaggcacacgccaccacgcccaactaaattttgtatttttagtagagacagtgtttcttcatgtgggtcagactggtctcaaactcccgaccttatgaggttcacccacctcaggctctcaaaggtctaggatgacagacgtgagccaccacgcccggcctaaaatccattttaatggggtgagatgaaaactcactttgattttaatttgtgtttctctgatgatgagtgaaactgagcactttttagtatgtggggaaatttcatgtgttttgctcctttttcaattaaatcgtttgttttattgagttgtttgagcttcttatatttctagttattaatcccatctcagatgcatagtttgcacatatttgctcccaatctgtgggttgtctcttcactttgttggtttatttttagcggtgcagaagttgcttagtttgaggtaatcccaatggtctatttttgcttcgattacttgtgttttgaaggtttaaaacaaaatgtcttccttcagacaaatgtcctggagcatttccccaatattttcttctacgtgtttcataggttcaggccttagactcacatctttaatccattttcatttgagttttgtgtatagtgacaggtagaggtgcagtttcattcctctgcatgtagatgtccaggtttccctgcactgtttattgaaaagactgtcctttcctgattgtgagttcttggcacctttgtcaaagtccattggatgggctgggcatggtggctgacacctgcaatttcagcactttgggagcccaaggcgggtggatcacctgaggccaggagttcaagattagtctggccgacgtgatgaaacattgtctccactaaaaatataaaaattagctgagcatggtggtcagcacctgtaataccactactcaggagtttgaggccagagaattgattgaacccaggaggctgtggtggcagtgaaccgagattgcacctctgcactccagcctgggtgacagagcgagactccatctcaaaagaaaaaagaaaaaaacattggaggtaaatgcatggattatatctgtgttcttcattctgctccattgttctacgtgcctttctttatgccaatgtgatgctgttttgcttactacagctctgtaacatattttgagatcaggtagtgtgatgctcctgttttctctttataccttgaagtctcaagacagtgggcgtcacatacaaaaattacggaaaaaaggatcccaggactcccagggcccaatattagataacagagtgttggccatgaaccaacctcaaagatttccattgagtagaggacagacaccctcatttcctcacctctctcctgtctcgtgttctaggaaacccttcaaatagttggccttcacccactgaaccaagctccgaaaccggtgagtacagaaccctcttatatccgcttttggaaacctggggaggtagaaaccttcgatgcaggcattgactcagcatctcgcagctctgacattgtacgcctgtcttctaccatctccgaactccagatactccaacagcgaaagggatctgggcccaacctagggctcagtgaaatctcttaatctctcattttatggagctgagacctcctacaagctagaagaatgattgccaatctgacatccttctcaggaaaaatgcaatgtttgttctgcctgcattcctaactggaggataaattcctgggggcttgagagagggaagggaagggaacatctgatgagggcgaggtgttttagagaagttccacttgccaaggaatgaattactgttggtcatgaagcaaccctggctgactcagcagagcaacagccttgccgtaacagagaacggagctcatgcacgcacacttcgactcactgactcattcagccacggccccatgctcaggctgtgcagtgcggaaccttttcctattgttgccataacaaatttccacaagattcgtgggtgaaaacaaaacggttttttaattatcttacagtgctgtagctcaaagtaggaagtgcatcttactgggctaaaatcaaggtgacagcaaggctgccttccctctgaggattccaggcaagaatctgcttctcacttatcccagcttctaaaggctcccagttccttggctcctgttccccttcctccttcctcaaagcccacaaagactggtcacatctcacatggcatcactcagtgccttcttccttaccacacctctttctctgaatgctgctctcccttcttccttatcttttgaaaacttggggattctattgggttcaccaagatgaaaatccctcataatctcctggaaatcatccaggatacccttgttttaagttcagctgattagcaaccgcaattccatctacaatcttcattcctcctttccatgtaaaataacatattcacaagctatggaggctaggacagggacattttggggtgggacagcattctcctgccttccacaaacggtgaacaagatgcatttggcttctgcccttgggacactgatattgcagatggttaaatgggagggcagaaaatgaatgcacaagtggatctataaatgaatgatccattgggaagcatctgtgcatgaaatctattttttgtttgttcttttgtttattgagacagagtcgccctctgtcttccaggctacagtgcagtgtcacgatcttggctcactgcaacctgcgtctcctggattcaagtgattctcctgcctccgcctctcgagtagctgggattacaggcaactgccaccgtgcccggctaattctttttgtatattttttgtagagaggatgtttcaccacgttggccaagcttgtctgaaactcccaacctcaagtgatccgaccgtctcagcatgccaaagtaatgggactacaggcgtgagccactgtgcccagccagaattcaaaatcaataatagataatgctgagtgtatgatttcaggtgacaaagaaggtctcactattcagatatttgtgacattaatgaaaaacacggattgaacccctgaaagattggcggaaggattttgcacacacagctgtcagccgtgaaggcacaaaggtgaaaacaatctgatgtggaaggaagaggctctgcctcaaatgctgggaatgatgtggggagaatgacaagacgactgtagagagacggagagcacactgggtacacaggaaactaaggagcaacaaggagtgtgtgtttgacactcacagccattggattcacctcggggtaaccaggaatccctacatgattaatatgactgacatgaaaataagggaggctcagttgcataactggaatctaggagaccgtggaaaaggcaattgccaccccactggtgaaatgtggtgctgatttagacactaaatgaatgaagtagatggatataagatatgtttgtgaggtagaatcattgactggaaacgcttactgggtttgattttcctacttgtttaatcctcgcttaattaatttctttctgagatttattcatcctacacataaatcaatacctggcaaaggagtgacagatatatgagtggtggtggaaatgaagagacttattatagcataatatacaagtctgtgaacagtggctcacgcctgtaacctagcactgcaggaggccaaggtgggtggattccatgaagtcaggagttccagaccagcctggccaacgtggtgaaaccctatctctactaaaaatacaaaaattagccgagcacgatggtgcatccctgtaatcccagctcctattctggaggatgaagcaggagaatgacttcaacccagtaggtggaggttgcagtgagtggagattgcatcactgcactccagcctgggggacacaaggagactctatctcaaaaaataaaaataagaaatacataaatataataaaacacacacgaatgacaaaggcacctgaattccaatcatcgtttttctatttctctataattacttctttgatcctttatcttatccattaggcaatgagcttaaaacctcttccctatttggctttctgtgagaatgagatcacatagaaaatgtgaaagccctcagaatcctccagcacagatcgtggaatagagaaagtgctctgttcatcgcaacaaaaaacttgcccactcacccaaatcccccacctcacccctacttccaatcacctgtggagattcagataggctatggggaggtaaacattgatactccttggagtgagtccagatcttggaatcagagatcagtgccagcactagctcctgctcccctttcctactaattcacaggaggacaggtggtattgaagcaatagatggccgagggggtggtccttcccccagcctctcgggtagaacagcagcctaacatgtgtctcccgagatcacaaagagtagcacgtttcacacgggcttcaacactatttcctggccatttgacataagagaattctacttagctttttttatcttgatttcacttttgtttccttttcttggagaatgcaagttgtttgattcaagaatgctgtggatgtagaaatcctaaagcacattcgctgtgtatcaatcccagtgcagtcttcccagagaagactctaaatacctcctggactgcacctgggcttatgccaattcctatcactcaccgtcactccagggagacagaacacacagagaatacattacacaggcaggttcattactaacagataagcagcgagtgacaacagaaacctacatttcaatgtgagccagtccctcaaggctcagaaaagctactcgggacatatggagtcaccccatttgcagtgtagctgggggaagccagagagcagcccagcctgggttttgtactgtggagccacaggaagcactcagctaaagcactgcatgacgtcctcctccaggaagaacaggaagacagcccaggctgttctgagacgttcctcctgatctcaggacgttgctgtcttagtccatttttgttgctctaaaggaacacttgagcctgggtaacttctagagaaaagagattggtttgcctcacagttctgcaggctgtactggaagcgtggcaccagcatctatttctcgtgacggcctcaggctgctcccactctggcagaagggaaggagggtctgtctgtgcagagaccacagagatcacacggcaagagagggagcaagggggagggggagcgatggagcttccaagctcttttgaacaaccagctctccaggaactaatagaaggggaacttgctaaccccgtctccttgggacagcattggtctgttcatgatggatccacctccatgacccaaacacctctcaagaggcccaacctcccacagtgggggtgaaatttcaatgtgaggtttgaaggggtcaaacatctcaactaaagtagttgtatcctcaacacgttctatggttactatgagagctataactgagaaagcaggagaaagctgggtctccctccatctgggtgcttgtcctaaaggggtgttgtatgtggttacctgtcaatcaagaaatgtgagacaattcataaagaggaactgctatgattagcttcttattggtgtctcctcttcttccaggtaaccccagacacctgcatgttctgattgggacctcagtggtcatcatcctcttcatcctcctcctcttctttctccttcatcgctggtgctgcaacaaaaaaagtaagtctcacgaagcagaggccagagagctcagggccatgtggggaagcaggatgggagcactcaggtgtgtgttcctcacagacaggatggtccctggcccaaggcagcagccacagagggaggactttctagagagagcaccagactccctgtccctgccttcagctcacagaccattgcctgattctgaactgtatcctcatgtcccctgcagccactcacatccaggagaaggttccatgacaggcagaaagtgggagacagaatcaatgggatgggaactcagagctattcatgggatgggtccttgagctcagagagatagaatgtctgagtctgctgttggcaactgagggacctcaggctcctatggtctccccctgtatgttggtatctgcttatgaaatgagggcccagaagtgccctctgagctgttttgttgacttccgtcttctacagatgctgttgtaatggaccaagagcctgcagggaacagaacagtgaacagggaggtaggtgctcctcggcccagcctcgtggctagtgttattcccaaagagtcctggaaaatgtgagcaccctccctcactcagcatttccctctctccaggactctgatgaacaagaccctcaggaggtgacatatgcacagttgaatcactgcgttttcacacagagaaaaatcactcgcccttctcagaggcccaagacacccccaacagatatcatcgtgtacacggaacttccaaatgctgagccctgatccaaagttgtctcctgcccatgagcaccacagtcaggccttgaggggatcttctagggagacaacagccctgtctcaaaactgggttgccagctccaatgtaccagcagctggaatctgaaggcgtgagtctgcatcttagggcatcgctcttcctcacaccacaaatctgaacgtgcctctcccttgcttacaaatgtctaaggtccccactgcctgctggagagaaaacacactcctttgcttagcccacaattctccatttcacttgacccctgcccacctctccaacctaactggcttacttcctagtctacttgaggctgcaatcacactgaggaactcacaattccaaacatacaagaggctccctcttaacacggcacttagacacgtgctgttccaccttccctcatgctgttccacctcccctcagactagctttcagccttctgtcagcagtaaaacttatatattttttaaaataatttcaatgtagttttccctccttcaaataaacatgtctgccctcatggtttaggtaatgggactcttttcttgcctaaggcttccggtgttatcagtaccatgtccatataatcccatctgttctccaccgggttctcacctctggactctgagcttctggaagcagtgtggagcctcatttgtctctgggactccaatttccatccaaagatgcagcacataggaggttccaaggatcgggaatcacatgaacaagtgacattgttactctctgcagacctggaaagctggcagagtcattccacgatgaaacatttgtagagtcataggccttgttagtctcatctccatggggacacatatcaacacatcatctttcatactataaatatacggtcactcctccgtatctgtggggtttacaggtctttattgaacaaagtataaatcaaaaatattcagagaaaatatccacagagttccaaaactcataactatgttgaatggacacaaatgaagctgtgtgtaggctgtatcaggaattataagtaatcaagagatgatttcatgtatacaggaggatgtgcatatgttatttgcaagcgctgtgccatttcatataagaggcttgagcatctacagattttggtatctgagtggagatctcgaaaccaatcacccacgaatagtgaaggatgaccgtatatgacttttatttctcaaatttaaatataaatcaaaaaatgtacaactagataaaaactaagaagtgtttttatagtgtgagttagatttattttttactaggtgtaacccattggtttaatattatttattgagaagacattctatgccaccttaaaccacacggcagcctttgtcaactctaaagggactgtgtgtacatggatgtattttagacagtttctgctaaggggctgtctgtgtccacacacttgatgatgctacactttatgtagccttatagaaccctttaaatttagtagccagagccctctaatttgttattataggctatttgcttttttttttcttgaggcggagtcttgctctgtcgcccaggctggactgcagtgacacaatctcagctcactgcaacctccgcctcccaggttcaagcgattctcgtgcctcagcctcttgagtagctggcgttacaggtgcctgccaccaggcatggctaatttttggatttttagcagagacacggtttcactatgttggccaggctgctctcaatcccctcatctcagttgatccgcccacctcggcttcccgacgtgctggggaaacttgattttctatagcattatgttactggatatttctgtaaaatttaaaatgagggaggcagagagacagagagagatcaaactccagagttgggactctggaatcttgggtcatgagacaaattttagattaaactacaaaactccagaatttacaggtgtggtttttgctgataaagtacaattctaacattgtaaataattgcataatccttccctgggaatttaaatcattttaactggttctgctgtaatactagaaatacaagcatgaaaaattctaatggtttattagtcacaatgactctgaaaaccttaataatacctattaaatattttgcatattacacatgaagaagagtttgaatctcagataaaaacaataaaaatacatgaaaagtctttcacgttagcacagattttaggcatctcgtgttcaggaggttggatctgagacgtgttttgagttggtcatagtgaaggacgctaggtgtaaattctagtgagaacaatttccaggaagccgtgttccgctcttgagcgagcacccactgggcctcatgcaaggtagaatgagcctgcgtacgtcaccctcccatgatgtggtcaacatgtaaactgcatgggcagggcgccaaataacatcctgtgcgctgctgagctgagctggggcacggccgcctgtctgcaccggcagcaccatgtcgctcacggtcgtcagcatggcgtgtgttggtgagtcctggaagggaatagaggaagggagtgtggggttggagatctgggcccagaggtggagatataggcctggaggtggagttgtgggcctggagtggagatctgggcctggagtggatatatgggcctagagatggagtgatgggcctagaagtggagatctgggcctggagtgccgataggaacctggaggggagataggagcctggagtggagatatgggcctggaggtggagttataggcctatagtagagatatgggcctggagtggagatttgggccaggagtggagatatgggcctagaggtggatatctgggcctagagtggaaatatgggcctaggatggagatatgggcctggttgtggagatatgggactggagaggagatatgggcctagagtggagatatgggcttggggtggagatctgggcctggggtggagatatgggcctggaggtggagttacgggccttcagtagagatatgggcctggggtggagatatgggcttggggtggagatctgggcctggagtggagatatgggcctggaggtggagttactggccttcagtagagatatgggcctggtgtggagatatgggcctggattggagatatgggcctaggttggagatctgagcctggagtggagatatgggcctggattggagatatgggcttacagtggagatcttggcctggattggcgatatgggcctggattggcgatatgggcctatgatggaaatatcggcctggagtggagatatgggcctggagtggagatacaggcctagggtggaaatattggcctggagtggagatatgggcttgtggtggggatatgggcttgtggtggggatctgggcttggaggctgggtctctgcacagccgacagccctgttcttgggtgcaggtaggcactgagggtgagtttaacttcagtccaggaagggcctgcctaccaagactcacagcccagtgagggcagcaagggagggctggtttgcctgcagatggatcgtccatcatgatctttctttccagggttcttcttgctgcagggggcctggccacatgagggtgagtccttctccaaaccttagggtgtcatctccccacataagaggattttcctgaaacaggagggaagtcctgtcagggagcctctcataaactaggaagaggggaccctggggtgctcggcccacagttccgacctcgcctccctggcctttcattcccttggcagagtcaagttctgtggggaccagggttagactggggtgctcaaagctggggtgcgtggtggggaagtggtaggaacagcagatcctctgaggacaaaggtgttactcacacttcagcgtttccatgacggtaggggctgcagtgtggctgctgtcactccaccagaagaggtgggaaaccacagccatggccctgacattccaaatcctctgatgggggctcagttgcttattttcattcaggcatctgctgatattccattctcaaagacatgccctccaccccatgtctaccctgtgttgttttatgtgagtaatcttacagtattaaaatctagtaggagtctcttactcagcacttgctcaaagttctcagctgacacttttgttgtagggagacaccttgtgtttgcgggatgggtccttcctttagccctgggcaccaaggtgtgatagcagccatagaaacttggaaagcgaggagaatcttcagagcacagggagggaggggtggctccacatcctcctctctaaggcggtgcctccttctccccaaggtggtcaggacaagcccttgctgtctgcctggcccagctctgtggtgcctccaggacatgtgattcttcggtgtcattcttatcttgggtttaacaacttcagtctgtaaaaggaagatggggtgcctggcactgagctctacaacagaatattctggaagagccttttcatgggccctgtgaccccagcacacacagggacgtacagatgtcggggttcacacccacactaccccagtgggtggtcggcacccagcaacaccctggtgatcatggccacaggtcagagggctcctgtcttggattctcctttcccacctcctgaatcccagagcttctggtgggcgtgtccttgagggtcccatcacccaggccctgactatatttggggtaaagggggattgaatacagggaaatgggtgctgtggtgggaagaataattgtccccagtgatgactacattctaatccctggagtctgtgactatttatgttataggggaaggaactgaaggggaagatggagctcaggttgttgatgagttgaccttgagatggggagacagcctggactgtcccgctgggctcagtgtaatcacaagggtccacatgaaaggaggaggaagaggggagtggggattagagcagcgcaatgggagactccaccagctttgaaggtggaggaaggccaggagccatgaatgcaggtggcctgtagaggttggaaaagtcaaggaaatgattctccagagtctccagagggaacgaagccctgcagatgccttgattttagcccaggaaaaacagggtcctatttctgtctccagtagtgaaatgggtcagtgtgctctctcctgctgccatgcttctgataattttctacagcagcaacaggaaaccaacactggaacccaggtcaaggacaaggtaagaaacaacacaaggatagccgggtgtggtggcaggcgcatgtaatcctagcgacttgggaggctgagggcaggagaatcacttgaacccaggagacagaggttgcagtgaccctagaccacaccacttcactccagctggggtgaaggagtgagactctgtctccataattaattaattaattaaaggaaccaaacaaggggaaggttggctacaccgagatgagcaagtgtgggatgatgatgccaccaccaggctccatccacatagggaggggttgatactcctcaaaccagcaccaggagccagcctatggaagctggcaccatggagaaggcacaggcatggcaagagtggctcccagtcccgaccaggaacagggtgtgtggacactggtgcctgccttattcatcagttcatacctactgccaaggattccaattcatccaaaagagattgaaccaggctgataagaggctggatgtgcagcctatcctggttcctctttcacccccacataaacagcaggaaagacattagtgtgaaatagatacaacaccccaagagatgaggctaagcccagtgggaagggaatcagaggcgactagagacagagggacagagaagagggagggagacagatggaaggacctgcaccaggagttatgggcacagaaaagaacatgaagacacagagaggaaggagagagacagacaccagcaaggggaagcctcactcattctaggtgccatggatgggatgataaagagagacaccttctaaactcacaacctctcttcctaggagtccacagaaaaccttccctcctggcccacccaggtcccctggtgaaatcagaagagacagtcatcctgcaatgttggtcagatgtcaggtttcagcacttccttctgcacagagaagggaagtttaacgacactttgcacctcactggagagcaccatgatggggtttccaaggccaacttctccatcggtcccatgatggaagacctggcagggacctacagatgctacggttctgttactcactcccccatcagttgtcagctcccagtgaccctctggacatcgtcatcacaggtgagagtgtccggacattcttctcattgtcattgggatgcagagtgaatgatccacgacttggaacccccaggtagttgtaaggaagatgagcttggtattcttatggagagagactgacttggtgaggtctgtaccaacagagacagagaaacaggagacacaagtacagaccaggtgtcataacagaggacagacacaggggccataccgggagttagaaaagacagaaggagttaaaggagacagacagacagacatgtcccagagagaggtgtccctccatgctgactttgctcagagacctggcacaggttagaagtttcatttctgttttacctccacaaagtgttctctaccaggagaacccaaggacacccatatttctgacctgagttgggccctgtggcctcaggccttgtggcacctacagatgccgtgtttattctgacacctctgccttccatgtaatggagagtaaccgtcccaggatatcatggccccagaacaccaactcctgtatgctgtgtgaacttgtggtctccagactggattctgaggctcacattccaaataaccccacatatgaaaggatcactgagaggcacagagagaaatcagggacaccaaaaagcaaagacataaacacacagagaatgagccagaggaaggagattgagagactcacagacacataaagagagagaaaagagggcagaggagtggtgagaatgatggaagggagcagagaaaagcactaaaattagactcctgagggagaggcacaaggacatagaaagatggagatgtggggatgaattgcagagattccaaagagaactagagagaccgagaggcagagcaagacagatgatagatggatagatatagatagatgataaataggtagatgatagataataggttaaagatacatagatgatgattgattgattcattaatagatgagacatagagatgatgatgatgaagacagatagataatacatagagatagagaggcagacagaagtcatagagagagagatgatacatagatatagataacagatgattgatggatagatagacaagtgatagatacatagatgatatatagatatagatgacaggtagagaatttgtagataggcaccgaatagataaatagatagatcgatagataatagatagaaatatgcagaaagttatgaacaggacacaaagtgagaaacttagaatttaaaaaagtaacatcaagtcaaccaatccaaggagagtcagagagaataaaacaatccaaaaagggaaaacatatctagaggtgtggaagcgaggtcagagacctagagagacagagaaggtggaaggaggaaatagacatgaagagagatggggtggagggtgagagagagagagagagagagcattaggtcatagagcaggggagtgagttctcagctcaggtgaagggagctgtgacaaggaagatcctccgtaaggaaaatgcctcttctccttccaggtctatatgagaaaccttctctctcagcccagccgggccccacggttctggcaggagagagcgtgaccttgtcctgcagctcccggagctcctatgacatgtaccatctatccagggagggggaggcccatgaacgtaggttctctgcagggcccaaggtcaacggaacattccaggctgactttcctctgggccctgccacccacggaggaacctacagatgcttcggctctttccgtgactctccctacgagtggtcaaactcgagtgacccactgcttgtttctgtcacaggtgaggaaagcccatggctgtcccatgtcctatgatcctagagccttagctgaggagcttcctgctgaggatggagagaaggatgaacagatgcagagagaagacgaagcttgggtgtgagggagggatcagggcacaggatggcagacagggcacctccaaaccctcctacatggcctgcatgaaggcctgcggccaggactccaggcacccaggcagatggagaaagcggtcaggagagacccagaggagggagactgggctcagtttgggaagatcagaggttccctcagcccctcaacattacccatttcccagaagcccatcctggcctcccacccacacagggatgtcatcacctgcaacccctacaccctttacttttgtttgagaaatatttattgaggataaatatacctatatagcttaccacctttaacattttttttttgaggcggagtctagctctgtcccctatgctggagtgcattggcacaatctcagctcactgcaacttccgcctcctgggttcaagcgattctcttgcctcagccacctgagtagctggtgctacaggcgcgcaccaccatgccaggctactttttgtatttttagtagagagggggtttcaccatgttggtcaagctggtctcgaactcctgaccacgtgatccacccgcatcagcctcccaaagtgctgggattacaggcatgagccaccacgcccagccacatttaccatttttaagtgtaaagtctagtggtcataaatacattaatatatatatatatacacatatttttttttaccctccacccttttcttcctggcctctggtagccaccattctactctctaccttcatgagatccaccttttagctcctgtatatgggtaagaaatgggaatctttgtaatgacctccagttccatccatgtggctgcaaatatcaggatgtttttctttctatggaagagtagtctccactatgcaaatgtaccacattctctctatccattcacccactgatgggcaggtaggttgactcctcatcttggctactgtgaagagtgctgcaccaatcatacgagtgcagatatcacttcgatatattgatttactttcctttggatataaacccagtagtgaaattgctggatactatgaaagttctctttttagtttttcgtttgttgttttgtttttgtttttgagacagtttccctctgtgcccaggctggagtacaagtgatgtcatcttggctcattgcaacctctgcctcctgggttcaaatgattttcctgcctcagcctccctagtatcagggattataggcgcacgccaccatgcctggctactttttgttttttttagtatagatgcggtttccccatgttggctgggctgctctcaaactcatgacctcaactgaggtgcccgcctcggtctcccaaagtgccgggattacaggcatgatccacctcacccaacctctttttagttctttaaaggacttccacacttttctccgtaatggctgtactaatttacactcctaccaacaggataccaggattctcctttctctaacaccttgccagcatttcttttgcctgtcttgcagctaaaagccattttattttatttcattttattttgagatggagtttcgctcttgtcacccaggctgagtgcagtggtgcgatctcggctcaccacaacctccacctcccaggttcaagcgattctcctgcctcagcctcccgagtagctggaattacaggcacacgccaccacgcccgactaatttttgtatttttagtagagacagtgtttctccatgtgggtcagactggtctcaaactcccgaccttatgagattcacccacctcaggctctcaaagttctaggatgacagacgtgagccaccacgcccggcctaaaagccattttaatggggtgagatgaaaactcactttgattttaatttgtgtttctctgatgatgagtgatactgagcactttttcgtatgtggggaaatttcatgtcttttgctcctgtttcaattaaatcatttgttttattgagttgtttgagcttcttatatttctagttattaatcccatctcagatgcatagtttgcacatatttgctcccaatctgtgggttgtctcttcactttgttggtttatttttagcggtgcagaagttgcttagtttgaggtaatcccaatggtctatttttgcttcgattacttgtgttttgaaggtttaaaacaaaatgtcttccttcagacaaacgtcctggagcatttccccaatattttcttctacgtgtttcataggttcaggccttagactcacatctttaatccattttcatttgatttttgtgtatagtgacaggcagaggtgcagtttcattcctctgcatgtcgatgtccaggtttccctgcactgtttattgaaaagactgtcctttcctgattgtgagttcttggcacctttgtcaaagtccattggatgggctgggcatggtggctgacacctgcaatttcagcactttgggagcccgaggtgggtggatcacctgaggccaagagttcaagattagtctggccaacgtgatgaaacatcgtctccactaaaaatataaaaattagctgagcatggtggtcagcacctgtaataccactactcaggagtttgaggcaagagaagtgattgaacccaggaggctgtggtggcagtgaaccgagattgcacctctgcactccagcctgggtgacagagcaagactccatctcaaaagaaaaacaaaaaatacattggaggtaaatgcatggattatatctgtgttattcattctgctccgttgttctatgtgcctttcttcatgccaacgtcatgctgtcttgcttactacagctctgtaacatattttgagatcaggtagtgtgatgctcctgttttctctttataccttgaagtctcaagacagtagccgtcacatacaaaaattacggaaaaaaggatcccaggactcccagggcccaatattagataacagagtgttggccatgaaccaacctcaaagatttccactgagtagaggacagacaccctcatttcctcacctctctcctgtctcatgttctaggaaacccttcaaatagttggccttcacccactgaaccaagctccaaaaccggtgagtacagaaccctcttatatccgcttttggaaacctggggaggtggaaaccttggattcaggcgttgactcagcatctcacagctctgacattgtacgcctgtcttctaccatctccaaactccagatactccaacagcgaaagggatctggacccaaaacagggctctgtgaaatctcttaatctctcattttatggagctgagatctcctacaagctagaaaaatgattggcaatctgacatccttctcaggaaaaatgcaatgtttgttctgcctgcattcctaactggaggataaattcctgggggcttgagagagggaagggtagggaacatttgatgagggcgaggtgttttagagaagttccacttgcccaggaatgaattactgttggtcatgaagcaaccctggctgactcagcagagcaagagctttgccttaacagagaacggagctcatgcacgcacacttcgactcactgactcattcagccacggccccatgctcaggccgtggaaaaggcaattcccagcactgcaggaggccaaggcgggtggatcacttgaagtcaggagttccagaccagcctggccaaaatggtgaaaccctgtctctatgaaaaatacaaaaattagccgagcatggtggtgcatccctgtaatcccagctcctactcttgaggatgaagcaggagaacgacttcaacccaggaggtggaggttgcagtgagtggagattgcatcactgcactccagcctgggtgacacaaggagactccgtctcaaaaaataaaaataagaaatgcataaatataataaaacacacacgaatgacaaaggcacctgaattccaatcatcatttttgtatttctctataattacttctttgatcctttgtcttatccattaggcaatgagcctaaaacctcttccgtatttggctttctgtgagcatgagaccatatagaaaatgtgaaagcctgctgaatcctccagcacagatcgtggaatagagaaagtgctctgttcatcacaaaaaaaacttgccctctcactcaaatcccccacttcacccctacttccaatcacctgtggagattcagatagaccatggggaggtaaacattaatactccttggagtgagtccagatcttggaatgagagatcagcaccagcactagctcctgctcccctttcctactaattcacaggaggacaggtggtattgaagcaatagatggtggagggggtggtccttcccccagcctctcaggtagaacagcagcctaacatgtgtctcccgagatcacaaagagtaggacgtttcacaggggcttcaacacgatttcctggctgttggacataagataactctatttcgcttttttatcttgatttcacttttgtttcctttccttggagaacgcaagttgtttgactcaagaatgctgtggatgtagaaatcctaaagcacattcgctgtgtgtcaatcccagtgcagtcttcccagaaaagaccctaaacacctcctagactgcacctgggcctacgccaattcctatcactcaccgtcactccagggagacagaacacacagagaatacgttacataggcaggttcattactaacagataagcagcgagtgaaaacagaagcctacatttcaatgtgagccagtccctcaaggctcagaaaagctgctcgggacatatggagtcaccccatttgcagtgtagctgggggaagccagaaagcagcccagcctgggttttgtaccctggagccacaggaagcactcagctaaagcactgcatgacgtcctcctccaggaagaacaggaagacagcccaggctgctctgggacgttcctcctgatctcaggacgttgctgtcttagtccatttttgttgctctaaaggaacacttgagcctgggcaacttctaaagaaaagagattggtttgcctcaccgttctgcaggctgtactggaagcatggcaccagcatctatttctcgtgatggcctcaggctgctcccactctggcagaagggaaggagggtctgtctgtgcagagaccacagagatcacacggcaagagagggagcaagggggagggggagcgatggagcttccaagttcttttgaacaaccagctctccaggaactaatagagggggaactagctaaccccgtctccttgggacagcattgatctgttcatgatggatccacctccatgacccaaacacctctcaagaggcccaacctcccacaatgggggtgaaatttcaatgtgaggtttgaaggggtcaaacatctcaactaaagtagttgtgtcctcagcacattctatggttactttgagagctataactgagaaagcaggagaaagctgggtctcccgccatctgggtgcttgtcctaaagaggtgttttacgtggttacctgtcaatcaagaaatgcgagacaattcataaagaggaactgctatgattagcttcttattggtgtctcatcttcttccaggtaacccaagacacctgcacgttctgattgggacctcagtggtcatcatcctcttcatcctcctcctcttctttctccttcatcgctggtgctccaacaagaaaagtaagtctcacgaaggagaggccagagagctcagggccatgtggggaagcaggatgggagcactcaggtgtgtgttcctcacaggtaggatggtccctggcccaaggcagcagccacagaggcaggactttctagagagggcaccagactccctgtccctgctttcagctcacagaccgttgcctgattctgaactgtatcctcatgtcccctgcagccactcacatccaggagaaggttccatgacaggcagaaagtgggagacagaatcaatgggatgggaactcagagctattcatgggatgggtccttgagctcagagagatagaatgtctgagtctgctgttggcaactgagggacctcaggcacctatggcctccccctgtttgttggtatctgcttatgaaatgaggacccagaagtgccctccgagctcttttgttgacttccgtctcctacacatgctgctgtaatggaccaagagcctgcagggaacagaacagcgaatagcgaggtaggtgctcctcggcccagcctcgtggctagtgttattcccaaacagtcctggaaaacgtgagcaccctccctcactcaggatttccctctctccaggactctgatgaacaagaccctcaggaggtgacatacgtacagttggatcactgcgttttcacacagagaaaaatcactcgcccttctcagaggcccaagacacccccaacagataccagagtgtacacggaacttccaaatgctgagtccagatccaaagttgtctcctgcccatgagcaccacagtcaggccttgaggggatcttctagggagacaacagccctgtctcaaaaccgggttgccagctcccatgtaccagcagctggaatctgaaggcgtgagtctgcatcttagggcatcgctcttcctcacaccacaaatctgaatgtgcctctctcttgcttacaaatgtctaaggtccccactgcctgctggagagaaaacacactcctttgcttagcccacaattctccatttcacttgacccctgcccacctctccaaccttactggcttacttcctagtctacttgaggctgcaatcacactgaggaactcacagttccaaacatacaagaggctccctcttaacacggcacttagacacgtcctgttccaccttccctcatgctgttccacctcccctcagagtatctttcagccttctgtcagcagtaaaacttatatattttttaaaataatttcaatgtagttttccctccttcaaataaacatgtctgccctcatggtttcggtaatgggactcttttcttgcctaagacttccattatcattaccatgtccacataaccccatctgttctccactgggttctcacccccggactctgagtttctggaagcagggtggagcctcatttgtctctgggactcctatttccatccaaagatgtagcacataggaggttccaaggatcgtgaatcacatgaacaagtgatattcttactctctgcagacctggaaatctggcagagtcattccaagatgaaacatttgtagaatcataggccttgttagtctcatctacacagggacacatatcaacacatcatctttcacactataaatatacagtcactcctccatatctgtggggtttacagttctttattgaaccgagtataaatcaaaaatattcagagaaagtatccacagagttacaaaaagcagaactgtgttgaatggacacaaatgaagctgtgtgtaggctgcatcaggaattataagtaatctagagatgatttcatgtatacaggaggatgtgcataggttatttgcaaactctgtgccatttcatataagaggcttgagcatctacagattttggtatctgagtggagatctcgaaaccaatcacccacgaatagtgaaggatgaccgtatatgacttttatttctcaaatttaaatataaatcataaaaaatgtacaactagataaaaactaagaagtgtttttatagtgtgagttagatttattttttcctaggtataacccattggtttaatattatttattgagaagacattctatgccaccttaaaccacacggcagcctttgtcaactctaaagggactgtgtgtacacggatgtactttagacactgtttctgctaaggggctctctgtgtccacactcttgatgatgctgcactttatgtagccttatagaaccctttaaatttagtagccagagctctctaatttgttattataggctatttgcttttttttcttgaggcggagtcttgctctgtcgcccaggctggactgcagtgacacaatctcagctcactgcaacttctgcctcccaggttcaagcgattctcatgcctcagcctcttgagtagctggcgttacaggtgcctgccaccaggcacggctaatttttggatttttagcagagacacggtttcactatattggccaggctgctctcaaactccttatctcagttgatccgcccacctcggcttcccaacgtgctggggaaacttgattttctatagcattatgttactggatatttctgtaaaatttaaaatgagggagggagagagacagacggaaaacaaactccagagttgggactctggaatcttgggtcatgagacaaattttagattaaactacaaaactccagaatttacaggtggggtttttactgataaagtacaattctaagattgtaaataattgcataatccttccctgggaatttaaatcattttaactggttctgctgtaatactagaaatacaagcatgaaaaattctaatggtttattagtgacaatgactctgaaaacattaataatacctattagatattttgcatattacacaggaagaagagtttgaatctcagataaaaacaatagaaatacatgaaaagtctttcatgttagcacagattttaggcatctcgtgttcgggaggttggatctcagacgtgttttgagttggtcatagtgaaggacactaggtgtcaaattctagcgagaacaatttccaggaagccgtgttccgctcttgagcgagcacccactgggcctcatgcaaggtagaaagagcctgcgtacgtcaccctcccatgatgtggtcaacatgtaaactgcatgggcagggcgccaaataacatcctgtgcgctgctgagctgagctcggtcgcggctgcctgtctgctccggcagcaccatgtcgctcttggtcgtcagcatggcgtgtgttggtgagtcctggaaagcaatagagggagggagtgaggggatggagatctgggcccagaggtggagatataggcctggaggtggagttatgggcctggagtggagatctgggcctggagtggatatatgggcctagagatggagtgatgggcctagaagtggagatctgggcccagaggtcgagatataggcctggaggtggagtgatgggactgtagtggagatctgggcctggagtggagataggaacctggaggggagataggaacctggaggggagatatgggcctggaggtggagatatgggcctggagtggagtcatgggcctggaggtggagttatgggcctgcagtagagatatgggcctgaagtggagacatgggcctggagtggagatatgggccaggagtggagatatgggcctagaggtcgatatctgggcctggagtggagatatgggccaggagtggagatatgggcctagaggtcgatatctgggcctggagaggagatatgtgcctaggatggagatacgggcctgggtgtggagatatgggactggagaggatatatgggcctggagtggagatatgggactggagaggagatatggacctggagtggagataagggcctggattggagatatgggcccagggtggagatctgagcctggattggagatatgggcctggattggcgatatgggcttagggtggaaatatcggcctggagtggagatatgggcctggagtggagatatgggcttgaggtggggatatggacctggaggctgggtctctgcacagccgacagccctgttcttgggtgcaggtaggcactgagggtgagtttaccttcagcccaggaagggcctggctaccaagactcacagcccagtgggggcagcaagggtgccctggtttgcctgcagatgggtcatccatcatgatctttctttccagggttcttcttgctgcagggggcctggccacatgagggtgagtccttctcccaaccttcgggtgtcatctccccacataagaggattttcctgaaatgggagggaagtcctgtcagggagtctctcataaactaggaagaagggaccctggggtgctgggcccacatttctgaccttgcctccctggcctttcattcccttggcagagtcaagttctgtggggaccagggttagactacggtgctcaaagctggggtgtgtggtggggaagtggtaggaacagcagatcctctgaggacaaaggtgttactcacacacttcagcgtttccatgacggtaggggctgcagtgtggctgctgtcattctaccagaagaggtgggaaaaccacagccatggccctgacattccaatcctctgatggggactcagttgtttattttcgttcaggcatcggctgatattccattctcaaaggacatgccctccaccccatgtctaccctgtgttgttttatgtgagtaatcttacagtattaaaatctagtaggagtctcttactcagcacttgctcaaagttctcagctgacacttttgttgtagggagacaccttgtgtttgcgggatgggtccttcctttagccctgggcaccaaggtgtgatagcagccatagaaacttggaaagcgaggagaatcttcagagcacagggagggaggggcggctccacatcctcctctctaaggcggtgcctccttctccccacggtggtcaggacaagcccttgctgtctgcctggccaagccctgtggtgcctccaggacatgtgattcttcagtgtcattcttatcttgggtttaacaacttcagtctgtaaaaggaagatggggtgcctgtccctgagctctacaacataatattctggaacagccttttcatgggccctgtgaccccagcacacgcagggacctatacatgtcggggttcacaaccacactaccccagtgggtggtcggcacccagcaaccccctggagatcacggtcacaggtcagagggctcctgtctgggattctccttgtcccacctcctgaatcccagagctcctggtgggcgtgtccttgcgggtcccatcatgcaagtcctgactgtatttggggtaaagggggattgaatacagggaaatgggtgctgtggtgggaagaataattgtccccagtgatgactacattctaatccctggagtctgtgactatttatgatataggggaagggactgaaggagaagatggagctcaggttgttgatgagttgaccttgagatggggagacagcctggactgtcctgatgggctcagtgtagtcacaggggtccacatgaaaggaggaggaagaggggagtggggattacagcagcataatgggagtctccatcagctttgaaggtggaggaagtccaggagccatgaatgcaggtggcctatagaggctggaaaagtcaaggaactgattctcctgagtctccagagggaacgaagccctgcaggtgccttgattttacccacgacaaacagggtccgatttctgtctccagaattggaaggggttagtgtgctctctcctggtgccatgcttctgataattttctacagcagcaacaggaaaccaacactggaacccaggtcaaggacaagttaagaaacaacacaaggatagccaggcatggtggcaggtgcatgtaatcctagcgacttgggaggctgagggcaggagaatcacttgaacccaggagacagaggttgcagtgagcctagaccacaccacttcactccagcctgggcaaaggagtgagactctgtcgccaaaattaattaattaattaaagaaaccaaacaaggagaaggttggctacactgagatcagcaaggctcagatgatgatgccaccaccaggctccatccacatagggaggggttgatactcctccaaccagcaccaggagccagcctatggaagctggcactggcatggcaagagtggctcccagtccctaccaggaacagggtgtgtggccactggtgcctgccttactgatcagttcatacctcctgccaaggattccaattcgtccaaaagagattgaaccaggctgctaagagcctggatgtgcagcctatcctggttcctcttccacccccacatagacagcaggaaagacattagttcgaaatagatacaacagcccaagagatgaggctgagcccagcggcaagggaatcagaggctactagagacagagggacagagaagagtgagggagacagatggaaggacctgcaccaggagttatgggcacagaaaagaacatgaagacacagagaggaaggagagagataagacaccaggaaggggaagcctgactcaatccaggtgccatggatgggatgataaagagagacaccttctaaactcacaacctctcttcctaggagtccacagaaaaccttccctcctggcccacccaggtcgcctggtgaaatcagaagagacagtcatcctgcagtgttggtcagatgtcatgtttgaacacttccttctgcacagagaggggatgtttaacgacactttgcgcctcattggagaacaccatgatggggtctccaaggccaacttctccatcagtcgcatgacgcaagacctggcagggacctacagatgctacggttctgttactcactccccctatcaggtgtcagctcccagtgaccctctggacatcgtgatcataggtgagagtgtccagactttcttctcattgtcattgggatgcagagtgaatgatccaggaattggagacccaggtggctgtaaggaagatgagcttggtattcttatggagagagactgacttggtgaggtctgtgccaacagagacagagaaacaggagacacaagtagagaccaggtgtcataacagagaacagacacaggggccataccgggagttagaaaagacagaaagagttaaaggagacacacagacagacatgtcccagagagaggtgtccctccatgctgactttgctcagagacctggcacaggttagaagtttcatttctgttttacctccacaaagtgttctctaccaggagaacccaaggacacccatatttctgacctgagttgggccctgtggcctcaggccttgtggcacctacagatgccatgtttattctgacacctctgccttccatgtaatggagagtaatcgtcccaggatatcatggccccacaacaccaacccctgtatgctgtgtgaacttgtagtctccagactggattctgaggctcatattccaaataagcccacttatgagaggatcagtgagaggcacagagagaaatcagggacaccaaaaagcaaagacataaacacacagagaatgagccagaggaaggagattgagagactcacagacacataaagagagagaaaagagggcagaggagtggtgagaatgatggaagggagcagagaaaagcactaaaattagactcctgagggagaggcacaaggacattgaaagatggagatgtggggatgaattgcagagattccaaagagaactagagagaccgagaggcagagcaagacagatgatagatggatagatatagatagatgataaataggtagatgatagataataggttatagatacatagatgatgattgattgattcattaatagatgagacatagagatgatgatgatgaagacagatagatagataatacatagagatacagaggcagacatagagaaatcatagagagagagagatgatacatagatatagataatagatgattgatggatagatagacaattgatggataaatagatgatatatagatatagatgacaggtagagaatttgtagataggcaccgaatagataaatagatagatcgatagataatagatagaaatatgcagaaagttatgaacaggacacaaagtgagaaactcagaattaaaaaaagtaacatcaagtcaaccaatccaaggagagtcagagagaataaaacaatccaaaaagagaaaacatatctagaggtggggaagtgaggtcagagacctagagagacagagaaggtggaaggaggaaatagacatgaagagcgatggggtagagggtgagagagagagagagagagcattaggtcatagaacaggggagtgagttctcagctcaggtgaagggagctgtgacaaagaagatcctccctgaggaaactgcctcttctccttccaggtctatatgagaaaccttctctctcagcccagctgggccccacggttctggcaggagagaatgtgaccttgtcctgcagctcccggagctcctatgacatgtaccatctatccagggaaggggaggcccatgaacgtaggctccctgcagggcccaaggtcaacggaacattccaggctgactttcctctgggccctgccacccacggagggacctacagatgcttcggctctttccatgactctccatacgagtggtcaaagtcaagtgacccactgcttgtttctgtcacaggtgaggaaagcccatggctgtcccatgtcctatgatcctagagccttagctgaggagcttcctgctgaggatggagagaagcatggacagatgcagagagaagacgcagcctcggtgtgagggagggatcagggcacaggatggccgacagggcacctccaaaccctcctacatggcctgcatggaggcccacggccagggctccaggcacccaggcagatggagaaagcggtcaggagagacccagaggagggagactgggctcagtttggggagatcagaggttccctcagcccctcaaccttacccatttcccagaagcccatcctggcctctcacccacacagagatgtcatcaccagcaacccctacaccctttacttttctttgaagaaatatttattgaggataaatatacctatatagcttaccacttttaacatttttttttgaggtggagtctagctctgtcccctatgatggagtgcagtggcacaatctcagctcactgcaacctccgcctcctgggttcaagcgattctcctgcctcagccacctgagtagctagtgctacaggcacgcaccaccacgccaggctactttttgtatttttagtagagaggtggtttcaccatgttggtcgagctggtctcgaactcctgaccacgtgatccacccgcatcagcctcccaaagtgctgggattacaggcatgggccaccaggcccagccacatttaccatttttaagtgtaaagtctagtggtcataaatacatttttatatatatatatatatacattttttttaccctccacccttttcttcctgtcctccagtagccaccattctactctctaccttcatgagatccaccttttagctcctgtatatgggtgagaaatgggaatctttttaatgacctccagttccatccatgtggctgcaaatgacaggatgttattctttctatggatgagtagtctccactgtgcgtatgtactacattctctctatccattcacccactgatgggcaggtaggttgactcctcatcttggctactgtgaacagtgctgcaccaatcatacgagtgcagatatcacttcgatatgttgatttactttcctttggatataaacccagtagtgaaattgctggatactatgaaagttctcttttttttttttttttcttttttgagaaagagtttccctccttagcccaagctggagtcaaagtggtgcaaccttggctcattgcaacctccgcctcctgggttcaaatgattttcctgcctcagcctccctagtagctgggattacaggtgcacaccaccatgcctggctactttttggtttttttagtatagatgcggtttccccatgttggctgggctgctctcaaactcatgacctcaactgaggtgcccgcctcagtctcccaaagtgccgggattacaggcatgatccacctcacccaacctctttttagttctttaaaggacttccatacttttctccgtaatggctgtactaatttacactcctcccaacagggtaccagggttctcctttctctaccaccttgccagcatttcttttgcctgtcttgcagctaaaagccattttattttatttcattttattttgagatggagttttgctcttctcacccaggctggagtgcagtggcgctatctcggctcaccacaacctccacctcccaggttcaagcgattctcctgcctcagcctcccgagtagctggaattacaggcacacgccaccacgccctactaatttttgtatttttagtagagacagcgtttctctatgtgggtcagactggtctcaaactcccaaccttatgagattcacccacctcaggttctcaaagttctaggatgacacaagtgagccacctcacccggcctaaaagccattttaatggggtgagatgaaaactcactttgattttaatttgcgtttctctgatgatgagtgatactgagcactttttcgtatgtggggaaatttcatgtcttttgctcctttttcaattaaatcatttgttttattgagttgtttgagcttcttatatttctagttattaatcccatctcagatgcatagtttgcacatatttgctcccaatctgtgggttgtctcttcactttgttggtttatttttagcagtgctgaagttgcttagtttgaggtaatcccaatggtctatttttgcttcgattacttgtgttttgaaggtttaaaacaaaatgtcttccttcagacaaacgtcctggagcatttccccaatattttgttctacgtgtttcataggttcaggccttagactcacatctttaatccattttcatttgatttttgtgtatggtgacaggtagagttgcagtttcattcctctgcatgtagatgtccaggtttccctgcactgtttattgaaaagactgtcctttcctgattgtgagttcttggcatctttgtcaaagtccattggatgggctgggcttggtggctaacacctgcaatttcagcactttgggagcccgaggtgggtggatcacctgaggccaggagttcaagattagtctggccaacgtgatgaaacatcgtctccactaaaaatataaaaattagctgagcatggtggtcagcacctgtaataccactactcaggaatttgaggcaagagaatgattgaacccaggaggctgaggttgcagtgaaccgagattgcacctctgcactccagcctgagtgacagagcaagactccatctcaaaagaaaaaataaaaaaccattggatgtaaatgcatggaatatatctgtgttattcattctgctccgttgttctatgtgcctttctttatgccaatgtcatgctattttgcttactacagctctgtaacatattttgagatcaggtagtgtgatgctcctgttttctctttatatcttgaagtctcaagacagtgggtgtcatataaaaaaattatggaaaaaaggatcccaggactcccagggctcaatattagataagagagtgttggccatgaaccatcctcaaagatttccactgagtggaggacagacaccctcatttcctcacctctctcctgtctcatgttctaggaaacccttcaaatagttggccttcacccactgaaccaagctccaaaaccggtgagtacagaaccctcttatatccgcttttggaaccctggggaggtgggaaccttggattcaggcgttgactcagcatctcacagctctgacattgtacacttgtcttccaccatctccgaactccagatactcctacagcgaaagggatctgggcccaacacagggctcagtgaaatctcttcatctctcattttatggagctgagacctcctacaagctagaagaatgattgccaatctgacatccttctcaggaaaaatgcaatgtttgttctacctgcattcctaactggaggataaattcctggagacttgagagagggaagggaagggaacatctgatgagggcaaggtgttttagagaagttccacttgccaaggaatgagctcctgtaggtcatgaagcaaccctggctgactccgcagagaaagagccttgccgtaacagagaacagagctcatgcacgcacacttcgactcactgactcattcagccacggccccatgctcaggctgtgcagtgtggaaccttttcctattgttgccataacaaatttccacaagattcgtgggtgaaaacaaaacggttttttaattatcttacagtgctgtagctcaaagtaggaagtgcatcttactgggctaaaatcaaggtgacagcaaggctgccttccctctgaggattccaggcacgaatctgcttctcacttgtcccagcttctaaaggctcccagttccttggctcctggtccccttcctccttcctcaaagcccacaaagactggtcacatctcacatggcatcactcagtgccttcttccttaccacacctctttctctgagtgctgctctcccttcttcctcatcttttgaaaacttggggattctattgggttcaccaagatgaaaatccctcataatctcctggaaatcatccaggatacccttgttttaagttcagctgattagcaaccataattccatctgcaatcttcattcctcctttccatgtaaaataacatattcacaagctatggaggctaggacagggacattttggggtgggacagcattctcctgccttccacaaacagtgaacaagatgcatttggcctctgcccttgggacactgatattgcagatggttaaatgggagggcagaaaatgaacgcacaagtggatctataaatgaatggtccattgggaagcatctgtgcatgaaatctattttttgtttgttcttttgtttattgagacagagtcgccctctgtcttccaggctacagtgcagtgtcacgatcttggctcactgcaacctgcgtctcctggattcaagtgattctcctgcctccgcctctcgagtagctgggattacaggcaactgccaccgtgcccggctaattctttttgtatattttttgtagagaggatgtttcaccacgttggccaagcttgtctgaaactcccaacctcaagtgatccgaccgtctcagcatgccaaagtaatgggactacaggcgtgagccactgtgcccagccagaattcaaaatcaataatagataatgctgagtgtatgatttcaggtgacaaagaaggtctcactattcagatatttgtgacattaatgaaaaacacggaatgaacccctgaaagattggcggaaggattttgcacacacagctgtcagccatgaaggcacaaaggtgaaaacaatctgatgtggaaggaagaggctctgactcaaatgctgggaatgaggtggggagaatgacaagacgactgtagagagacggagagcacactgggtacacaggaaactaaggagcaacaaggagtgtgtgtttgacactcacagccattggattcacctcggggtaaccaggaatccctacatgattaatatgactgacatgaaaataagggaggcccaggtgcataactggaatctaggagaccgtggaaaaggcaattgccgccccactggtgaaatgtggtgctgatttagacactaaatgaatgaagtagatggatataagatatgtttgtgaggtagaatcattgactggaaaggcttactgggtttgattttcctacttgtttaatcctcgcttaattaatttctttctgagatttattcatcctacacataaatcaatacctggcaaaggagtgacagatatatgagtggtggtggaaatgaagagacttattatagcataatatacaagtctgtgaacagtggctcacgcctgtaacctagcactgcaggaggccaaggtgggtggattccatgaagtcaggagttccagaccagcctggccaacgtggtgaaaccctatctctactaaaaatacaaaaattagccgagcacgatggtgcatccctgtaatcccagctcctattctggaggatgaagcaggagaatgacttcaacccagtaggtggaggttgcagtgagtggagattgcatcactgcactccagcctgggggacacaaggagactctatctcaaaaaataaaaataagaaatacataaatataataaaacacacacgaatgacaaaggcacctgaattccaatcatcgtttttctatttctctataattacttctttgatcctttatcttatccattaggcaatgagcctaaaacctcttccctatttggctttctgtgagcatgagatcatatagaaaatgtgaaagcccgctgaatcctccagcacagatcctggaatagagaaagtgctctggtcatcacaaaaaaaacttgcccactcacccaaatcccccacctcacccctacttccaatcacctgtggagattcagatagaccatggggaggtaaacattaacactccttgaagtgagtccagatcttggaatcagagatcagcgacagcactagctcctgctcccctttcctactaattcacaggaggacaggtggttttgaagcaatagatggccgagggggtggtccttcccccagcctctcgggtagaacagcagcctaatatgtgtctcccgagatcacaaagagcagcaggtttcacacgggcttcaacactatttcctggccgtttgacataagagaattctatttcgctttttttatcttgatttcacttttgttttctttccttggagaatgcaagttgtttgattcaagaatgctgtggatgtagaaaccctaaagcacattcgctgtgaatcaatcccagtccagtcttcccagagaagactctaaacacctcctggactgcacctgggcctatgccaattcctatcactcaccgtcactccagggagacagaacacacagagaatacgttacataggcaggttcattactaacagataagcagcgagtgacaacagaaacctatatttcaatgtgacccagtccctcaaggctcagaaaagctcctcgggacatatggagtcaccccatttgcagtgtagctgcgggaagccagaaagcagcccagcctgggttttgtaccctggagccacaggaagcactcagctaaagcactgcatgacgtcctccaggaagaacaggaagacagcccagggtgttctgagacgttcctcctgatctcaggaagttgctgtcttaggccatttttgttgctctaaaggaacacttgagcctcggtaacttctaaagaaaagagattggtttgcctcaccgttctgcaggctgtactggaagcatggcaccagcatctatttctcgtgacggcctcaggctgctcccactctggcagaagggaaggagggtctgtctgtgcagagaccacagagatcacacggcaagagagggagcaagggggagggggagtgatggagcttccaagctctttttaacaaccagctctccgggaactaatagagggggaacttgctaaccccgtctccttgggacagcattgatgtgttcatgatggatccacctccatgacccaaacacctctcaagaggcccaacctcccacagtgggggtgaaatttcaatgtgaggtttgaaggggtcaaacatctcaactaaagtagtcgtatcctcagcacgttctatggttactatgagagctataacagaaaaagcaggagaaagctgggtctcctgccatctgggtgcttgtcctaaagaggtgttttatgtggttacctgtcaatcaagaaatgcgagacaattcataaagaggaactgctaagattagcttcttattggtgtctcatcttcttccaggtaacccccgacacctgcacattctgattgggacctcagtggtcatcatcctcttcatcctcctcttctttctccttcatcgctggtgctccaacaaaaaaagtaagtctcacgaagcagaggccagagagctcagggccatgtggggaagcaggatgggagcactcaggtgtgtgttcctcacaaacaggatggtccctggcccaaggcagcagccacagaggcaggactttctagagagggcaccagactccctgtccctgccttcaactcacagaccgttgcctgattctgaactgtatccccatgtcccctgcagccactcacatccaggagaaggttccatgacaggcagaaagtgggagacagaatcaatgggatgggaactcagagctattcatgggatgggtccttgagctcagagagatagaatgtctgagtctgctgttggcaactgagggacctcagccacctatggtctccccctgtatgttggtatctgcttatgaaatgaggacccagaagtgccctccgagctgttttgttgacttccatcttctacagatgctgcggtaatggaccaagagtctgcaggaaacagaacagcgaatagcgaggtaggtactcctcggcccgggctcgtggctactgttattcccaaagagtcctggaaaatgtgagcaccctccctcactcagcatttccctctctccaggactctgatgaacaagaccctcaggaggtgacatacacacagttgaatcactgcgttttcacacagagaaaaatcactcgcccttctcagaggcccaagacacccccaacagatatcatcgtgtacacggaacttccaaatgctgagtccagatccaaagttgtctcctgcccatgagcaccacagtcaggccttgagggcgtcttctagggagacaacagccctgtctcaaaaccgggttgccagctcccatgtaccagcagctggaatctgaaggcgtgagtctgcatcttagggcatcgatcttcctcacaccacaaatctgaatgtgcctctctcttgcttacaaatgtctaaggtccccactgcctgctggagaaaaaacacactcctttgcttaacccacagttctccatttcacttgacccctgcccacctctccaacctaactggcttacttcctagtctacttgaggctgcaatcacactgaggaactcacaattccaaacatacaagaggctccctcttaacgcagcacttagacacgtgttgttccaccttccctcatgctgttccacctcccctcagactagctttcagtcttctgtcagcagtaaaacttatatattttttaaaataacttcaatgtagttttccatccttcaaataaacatgtctgcccccatggtttcggtaatgggactcttttcttgcctaaggcttccggtgttatcagtaccatgtccatataatcccatctgttccccactgagttctcatccccggactctgagtttctggaagcagggtggagcctcatttgtctctgggactccaatttccatccaaagatgtagcacataggaggttccaaggatcacgaatcatatgaacaagtgatactcttactctctgcagacctggaaagctggcagagtcattccacaatgaaacatttgtagaatcataggccttgttagtctcatctccatggggacacatatcaacacatcatctttcataatataaatatacggtcactcctccatatctgcggggtttacaggtgtttattgaaccaagtataaatcaaaaatattgagagaaagtatccacagagtttcaaaaagcataactatgttgaatggacacaaatgaagctgtgtgtaggctgtatcaggaattataagtaatctagagatgatttcatgtatacaggaggatgtgcataggttatttgcaaacgctgtgccatttcatataagaggcttgagcatctacagattttggtatctgagtggagatctcaaaaccaatcacccacgaatagtgaaggatgaccgtatatgacttttatttctcaaatttaaatataaatcataaaaaatgtacaactagataaaaactaagaagtgtttttatagtgtgagttagatttattttttcctaggtgtaaccaattggtttaatattatttattgagaagacattctatgccaccttaaaccacacggcagcctttgtcaactctaaagggactgtgtgtacatggatgtattttagacactgtttctgctaaggggctctctgtgtccacactcttgatgatgctgcactttatgtagccttatagaaccctttaaatttagtagccagagccctctaatttgttattataggctgtttgctttttttttcttgaggcggagtcttgctctgtcgcccaggctggactgcagtggcacaatctcagctcactgcaacctccgcctcccaggttcaagcgattctcgtgcctcagcctcttgagtagctggcgttacaggtgcctgccaccaggcacggctaatttttggatttttaacagagacacggtttcactatattggccaggctgctctcaaactccttatctcagttgatccgcccacctcggcttcccaacgtgctggggaaaacttgattttctatagcattatgttactggatatttctgtaaaatttaaaacgagggagggagagagacagacagagagcaaactccagagttgggactctggaatcttgggtcatgagacaaattttagattaaactacaaaactccagaatttacaggtgtggtttttgctgataaagtacaattctaagattgtaaataattgcataatccttccctgggaatttaaatcattttagctggttctgctgtaatactagaaatacaagcatgaaaaattctaatggtttattagtcacaatgactccgaaaacattaataatacctattagatactttgcatattacacaggaagaagagtttgaatctcagataaaaacaaaaaaaatacatgaaaagtctttcatgttagcacagattttaggcatctcgtgttcggataaaaatacatgaaaagtctttcacgttagcacagattttaggcatcttgtgttcgggaggttggatctgagacgtgttgtgagttggtcatagtgaaggacgtgaggtgccaattctagtgagaacaatttccaggaagccgtgttccgctcttgagcaagcatccactgggcctcatgcaaggtagaaagagcctgcgtacgtcaccctcccatgatgtagtcaacatgtaagctgcatgggcagggcgccaaataacatcctgtgcgctgctgagctgagctggggcgcggccgcctgtctgcaccggcagcaccatgtcgctcatggtcgtcagcatggcgtgtgttggtgagtcctggaaaggaatagagggagggagtgccacatcctcctctctaaggtggcgcctccttctcccccaggtggtcaggacaagcccttcctctctgcctggcccagccctgtggtgtctgaaggagaacatgtggctcttcagtgtcgctctcgtcttgggtttaacgaattcagtctgtccaaagaagacgggatgcctgtccctgagctctacaacagagtattccgaaacaccgttttcataggccctgtgaccccagcacatgcagggacctacagatgtcggggttcacacccacacttcctcactgggtggtcagcacccagcaaccccctggtgatcatggtcacaggtcagagggctcctgtctgggattctccttgtcccacctcctgagtcccagagcttctggtgggagtgtccaccagcgtcccatcatccagaccctaactgtatttggggtaaaaggggattgaatacagggaaatgggtgctgtggtggaaagaataattgtccccaatgatgactgcattctaatccctgcagtctgtgactatttatgttataggggaaggcactgaaggggaagatggagctcaggttgttgagttgaccttgagatggggagacagcctggactgtcctgctgggctcagtgtaatcacaagggtgcacatgagaggagaaggaagaggggagtggcgattagagcagtgcaatggaagtctccatcagctttgaaggtggaggaaggccatgagccatgaatgcaggtggcctatagaggctggaaaagtcaaggaactgattctcctgggtctccagagggaacgcagccctgcagatgccttgattttagccctcaaaaaacagggtccgatttctgtctccagaaacggaaggggtcagtgtgctctctcctgctgccatgcttctgataattttccacagcaccaacaggaaaccaacactggaacccaggtcaaggacaagataagaaaggacacaaggatagccgggcgtggtggcaggtgcatgtaatcctagcaactcaggaggctgagggcaggagaatcacttgaacccaggagacagaggttgcagtgagcctagaccacaccacttcactccagcctgggtgaaggagtgagactctgactccaaaattaattaattaattaaagaaaccaaacaaagagaaggttggctacaccgagatcagcaagggtgggatgatgatgccaccaccaggctccatccacatagggaggggttgatactcctcaaaccagcaccagaagccagcctatggaagctggcaccatggagaaggcacaggcatggcaagagtggctcccagtccccaccaggaacagggtgtgtggacactggtgcctgccttactgatcagttcataccttctgccaaggattccaattcgtccaaaagagattgaaccagtctgctaagagcctggacgtgcagcctatcctggttcctcttccacccccacatagaagcaggaaagacattagttcgaaatagatacaacagcccaagagatgaggctgagcccagcggcaagggaatcaggagctactagagacagagggacagagaagagggagggagacagatggaaggacctgtaccaggagttatgggcacagaaaagaacatgaagacacagagaggaaggagagagataagacaccagcgaggggaagcctcactcattctaggtgccatggatgggatgataaagagagatgccttctaaagtcacaacctctcttcctaggagtccacagaaaaccttccctcctggcccacccaggtcccctggtgaaatcagaagagacagtcatcctgcaatgttggtcagatgtcatgtttgagcacttccttctgcacagagaggggaagtttaatgacactttgcgcctcactggagagctccatgatggggtctccaaggccaacttctccatcggtcgcatgacgcaagaccttgcagggacctacagatgctacggttctgttcctcattccccctatcagttgtcagctcccagtgaccctctggacatcgtgattacaggtgagagtgtctggacattattctcattgtcactgggacacagagtgaatgatccacgacttggaggcccaggtggttataaggaagatgagcttggtattcttatggagagagactaacttggtgaggtctgtaccaacagagacagagaaacaggagacacaagtacagaccaggtgtcataacagaggacagacacaggggccatacagggagttagaaaagacagaaagagttaaaggagacacagacagacatgtgccagagagaggtgtccttccatgctgactttgctcagagacctggcacaggttagaagtttcatttctgttttacttccacaaagtgttctctaccagaagaacccaaggacacccatatttctggcctgagttgggccctgtggcctcaggccttctggcacctacagatgccgtgtttattctgacacctctgccttccatgcaatggagagtaatcgtcccaggatatcatggccccagaacatcaacccctgtatactgtgtgaacttgcggtccccagactggattctgaggctcacattccaaataaccccacatatgagaggatcactgagagacacagagagaaatcagggacaccaaaaagcaaagacataaacacacagagaatgagccagaggaaggagattgagagactcacagacacataaagagggagaaaagagggcagagaagtggagagaacaatggaagggaacagagaaaagcactaaaattagagtcctgagggagagacacaaggacatagaaagatggagatgtggggatgaattgcagagattccaaagagaactagagagaccgagaggcagagcaagacagatgatagatggatagatatagatagatgataaataggtagatgatagataataggttatagatacatagatgatgattgattcattcattgattaatcgatgatacatagagatgatgaagatgaagatagatagataatacatagagatagagaggcagacaaagagaaatcatagagagagagagacgatacatagatatagataatagatgatttttggatagacaattgatagataaatagattatatatagatatagatgacaggtagagaatttgtagataggcaccaaatagataaatagatatatcgatagataatagatagaaatatgcagaaagttatgaacaggacacaaagtgagaaactcagaatttaaaaaaagtaacatcaagtcaactagtccaaggagagtcagagagaataaaacaatccaaaaagggaaaacatatctagaggtgagaaagtgaggtcagagacctagagagacagagaaggtggaaagaggaaatagacataaagagagatggtgtggagggtgagacagagagagagagcattaggccatagagcaggggagtgagttctcagctcaggtgggaggggagttgtgacaaggaagaacctccctgaggaaactgcctcttctccttccaggtctatgtgggaaaccttctctctcagcccagccgcgccccatggttaaggcaggagagagcgtgaccttgtcctgcagctcccggagctcctatgacatctaccatctatcaagggagggggaggctcatgaacttaggttccctgcagtgcccaaggtcaatggaaccttccaggccaactttcctctgggccctgccacccacggagggacctacagatgcttcggctctttccgtgactctccctacgagtggtcagaccttagtgacccactgcttgtttctgtcacaggtgaggaaaccagtctgttccccaaatagtgggactcagatggactacaatggccacattcaggggagcctcagatggagggggtggccatgggggtgtcagccagagatgctggacagaagagacacaaagcaaacatacagaaagaggcatagacagacagacagagcgaggcagacagatcacattagggtttggggtggtaactgcaaccctacctgaagcttgcagatagagcacaggccacataaaccacttcccagtctttgtacagaagcccacctgggacacatgtaaacagcatcaatgctgactcaggagcatgaaaggccgggctcagattggaaagactagaggtagcattggccgcccgccattgcccatttccagaagcccccacctctcaccaaagagtgatttccacatggggggcacagatgcaaccatcgttgggggagccccaatgtctcttgatgggaggcattttccaccctagatgttttttgctctctccacaccttggagactcagtgggggagtcttctctggggactcggggagggcctccctgggactcgcaggatttccaagctagatgacaacatgacaggtggaaacaggcccattccttcgccaggggccccaagctccatcccaggagatgagaagaggctcttctcattggtcagtggatccctgaggggacagaggctcagcactgaaggctgagaaggatctgccacttcgctcagtggcctcaagccagacatcttccctacagacttgcagtgattctccatcagcatttagggctgtggccaccaacctgggtgttggtctgtaggaacttttcatttctgaccttccataactgagttctcttcctaaatgtggaatgccttgtactccatgttactctctccccagaaagaatgtgtggcttgtctgctctccagccctgtcatggagattgataatccttagggagcaagaggagagggaaagaacaaagtatgagaccacctaggtgctactggttgaggttccatttgccagtgaagggacttcactcagccgagggggcaactcagggaagtcagccgagggagggcattagagtagagagaactgagctcacccagtaaatgaccccttcactaactcattcatctaatatttatttcacacctaccatcagttctctctgtttcacggccaggagtagacagcacggccaagctcctgggttcatgatgctcacattgctgtggggtgggagagagaggcagaacatgaatgaatgaatgagagaatgaatgaatgagtgaatgatggaatgagtgaatgaatgaatgaatgaatgtatgaattagtgagtgaatccttagcacttggtgaaagtgccatgcacagaatgaaatgaatgaacgtggaacgttgtcatttggagtgtacaggagggaacgtctcactgagacctcatcagagagatcacatttaaactccgatcttagagacaagagggagtgagccctggggagtgtgttgaaaggaactttcatggacttaggacattggggatgaccctaatgtgagaatgagcttggtgtgttccaagaagtccatggacctgccatatggtgagggctggtcagaatccagagagatttctaaatgcccttgtgcttgtaaggaaagtgagtcctgtggttgggagtggacttataccttgggtcaggtccagcaattatctttctaaatcctctctaattgcctgaaccacttctatcaacaactgagaaaagaggagtgttaaacaccccactgtggccgtggatttgcctacctgtccatttatttccgcgactcttcctccatgtatatttgcaggaatattactgggagtggttaagtgtaaactgattatatattcctggtaaatttaaaatgctataaatttacctgcttttttcctacattttatgcttaatgttttccgctgatttttcccaaagactaattttgtctaattttaatatagttataccacatttctaacagtgattgcttggtatatttctacattgtttaatttcaaactccatgaattgttaacattgagatgtgtcctttgtaaatttcaaacaattcgccttagaaagtaagactttctgacaatcttttgttcatgtttgagcagttcttccaatcatatttttgttattattacgttgtgttttcctgattccctttttttcccactgacttctgtggttttctatttcaaacattctatttttgatctatgtcgtttaggaatacatatatggtgtactcatcctgaagttgttacatatttttaaaattgaaattaatcatttcagagattaaactgcaaatataaaaacatatttccactcttcctgtgtaagaacaggattttagagcatatttagtacatatgtttgtatttacttatatgatgttttgttttgtggtatacataattctatctttttcagaaattacacaggggcgtgttttcatacactatcgtatggtccatattcatttttggcatagccatatttttagttcttcctctgctcttagttattgtcagaatcttcgacaccccatctggtttcactttctttatctttgaggcacggtcatcagaatttcctttagggtcagtgagaaaagctttctttgcccttttgtctttcagttctgtttctttcctgcgttgatcttggacagtaactgtactatgtaaggaattgtcggtggctggcgacggtatcttagctgggtaaagatgctattctactggcttatgttttccttttttctgtggggaagacaatgcttggctccctataaatccttaccagctgatccttttcctctggctaattttaagggttggttgtgcttttatgctgcttttctgtaatgttgaacgtgaggtgtgtttacttcattctgcctggcattcactggatttcttgaacctgtggattgatggatgtgtctacttcctccaaataatcaacaattgcctctttaaagattgcttctgacctgttttctcgttctttctttttggaactcaagttaggagcattctaaaactgttgtcaatttttaccctgtcacaaaactgctctttcttgtttcagttatttgctttttctgtgcattaatattgatggtttcctctgtcatagaggataaatactctcttcactgttgtgtacacaacattttaactagttattctggtttaaatttaatattgactttatctacatatcacaattgattactgtgtacagactttcttttctattagtataaatttatgaggtacacttgtaattttgtgacatgagtatgttgcagagtagtgaagtcaggacttttactatatccatcacccaaataccgtacattgtactcattaagcaaattctcatcactcacccacgtcccgccaccctccagccttctagcctccgctgtccgtcattccacactctacgtccatatgtacacattactcccctcccatgtagagtgagaagatgtggtatttgtctttctgagtggttttatgtaaaataatggcgtccagctccatctatgttgctgcaaaagacatggttttatttttatgaccaaatagtatttcgttgtgtatacacgcatcctttttttaatccaatcattcattcacagacacttagattgatttcatatctttgctattgcaaacagtgctgcaataaacatacaggtgcaggtattttttgagtagatacccagcagcgggacccctagatcgaatggtgcttctatttttggttctctgccaaatttccatactgtcttccatagaggctatactaatttacataccggccaacagtgtataagagtttccttttctctgcatccttgccaacacctgttatatgtttcactttttctttttttctttttgagatggagtcttccactgtcacccaggctggagtgcagtgccgccatctccacgcgctgcaacctccaccaaccaggttcaaatgattctcctgcctcagcctcctgagtagctgggattacagaaccacaccaccatgcccagctaatcttttgtatatttagtagagatggggtttcactatgttggtcaggctggtctcaaactcctgacctcatgatccacccgcctcagcttcccaaagtgctgggattacaagcgtgagccaccactccccaccagcatttttagtaatagccattctgactactgtaagatgatatctcattgtggtttcaatttgcatttctctgatgattagtgatgttcatacgctgtttggccattcgtatgtcttcttttgaaaaatgtctatgtatatccctttgcccactttttaatgctattatttgaggggttatgtttagttgtttgagttgcctagaaattctggatgttagtcctctgttgggtgcatagtttgcaaacatttccattcattctgtgggttgtctgttcaccctgctactatttcctttgcttggcagaagctctttcgtttattaagtcccattggtctagttttatttttattgcctgtgcttttgaggtcttagtgatgaattctttgcccagaccaatgcccagaagagtttctctttgggtttccaccggtgattttatagttctggatttacatttaagctgctaattaccttaagttaatttatgtgtatgattacagatacaggtccagttttattcttctgcatatggctatttagttttcccagcaccttttattgaaaaggaaatctttctccagtgtatgttttgttaacgtcgtcaatgattattcactgtagatatgaggctgtatttctgggctctctattctggtctattgatctctgtttctgtgtctataccagcactgtgctatttaagttactatagccttagagcatagtttgaagtcagatagcgtgatgcctccaggtttctacattcacctagaattgctttctctattaggatcttttttggttctgtatgaattttaggattgctttttctaattctgtgaaaactggtgttactattttcatataagaattgcactgaatctgtagattgctttaggcagtatggtcattttaacaatattaattcttatgatccatgagcgtgggattttttttctttttttttttttgtattatctataattgctttcattggtgtcttacacctttcctggtacagatctttcaccaccttggttaaatgtattcctgagtgttttaattttgcgtatctattgtaaacggcattgccttcttgatttggttctcagctagatcattataggtgtagagaaatgctaccggcttttacatattgattttgtattctgaaactttacttagttcatttatcaatcataagaatttttggcagggtctttaggattttctagatttaagatcatagcatcagaaataaaaataattttacttcctcttttctaatttggatttttaattcttcctgttgcccaatagctctgacaaggcttccagtactatgttgataggaagtggtggatgtccgtgtccttgtcttgtgccagttctcagaggagtgcttttaacttttcctgttcagtatgatgttgactctagatatgtcatctatggcttttattattttgaggtatgttctttctatgcctaagtttttgagggttttcatcaggtaaggatgttgaatttcttttcagatgcttttctttatgtctattgagatgatcatatggtttttgttctggattctgctcgttcttctaagtggatgagacatgccagaaaagcatttagtcagccatcttggaaacaagcatctcagatgttttctttctctatagctcattctttcttaccagtgttttcaattttgtacttaattttgtaaagagagtaaatgatataatttccacatatgtttcctctgccaaatcagactcactatgcttcctttccttgtatacataacctacccagcaatacacacaaacatttattgctttggagaattagtttgggaacatttttgaaatgtacaaaaaaatgtatatcttcaaaagaaatttctttttgtggcaaaagacttctgaaggtgctcatgatgatatagggagaagaggggttctggacaggaagaattttatgaaggtgagatggggaaatagctccatttcagagcttctggggagagaggggcctggcccacatggaaaggtctctgatcttacccccaccctccagcccctgttctccagaactatactgtggagagttccatcaggattgttgtggctggtctggtcttcctggctcttttggcaatgctggctaagacctggtggagacatgaggggccacaggtggaaatggaagaaacatgactgaagctggctggagtgaatggcgcgacattctgtctgtgggagattggccagatgggtttcaagtgtgttgtatcagctgtgacttttagtaatgttcttgctaccacaatatccactcgtccatcccgaataattgtgatgaaatattgtccttgggataatattcatttgctaaagacagggatgatacctcaaggtgccactatatacatcgaggggatccacaaaagtccattcagtaaaatgtagttggcatcttagggtaggttgattccacctctaaaaaagtaggtacaacatcaggttgatttttccgaagaaaagtggtgattggccatctttagtctcaatgtaaacggtaatactgatgagtgtggaaaaggcagggaagaggattgacaataagtgacactcattgttttcatctgagctttgagactgaaagaggaacacaggagtgagatgtatgggaacaaaccccttctttttccagctaaacagagtggaagttggacactgagttttggcgtacagcaaaatcctaagtccattgttgggttgaacacggccatgttgtacatcctggtttcacagcagacactggaggaaaacagcctgtattcataagaggctgtccctcgggtcactgcccagaatatccggagttggtgctcacagggttgggaactctcctggaccagacaggctctggatatgggggggtaccaagctccccggggccatgcctccacagctctcttctcacctcattcttgaccatttcccaaacctctgacctcaccttcattcatccatggtgaacacgctaaaactggccttcaaagcttgagacagaggaaaattgggcttcatctctgggaactaaattggggagtggagactcagttctggcctgacaggagggagaagaccctggatcccagtgtggatgggaagaagtatgtgtttctcttttgtgcttggaccctgtgtccaagcatgtctgagatgtgatgaagatgaatcttcctttccttgtctattttctcatgccagagaattggaatcttatattccattaactctttctgttctgttcatccagattctatgaaggagaaaggaaaagatgtgatactgtaattttgctccatttgtctaaaatgagtaggctgcaactcctcttgaagtgataccttttctagctcttgttggaggtgtctcaggactcattacttcggggaacctgcaactgtgtcagtctggggaaactgcaaatattcttgtcttacatttgtctccagccaattgtgatggactccagtgacctgcaattgctgttattgcaggtaaaatgtacctgagtcaggccacagttctcctggactatgagcccctggccatgttcctgaggcaattctgttcatctaaatataataataataacacactaaaaatggcaagccattgttaattcctgaagtctcatttgaaaattactaaatgtctgttattttttggtgtttacattatatgtagacagataaactacacacacacacacacacacacatgcacacagaagaatggattgtttcatgtagaaaagtaaataattcaagatgaaaggatgaaatgtcatggcacctactattctattttagataaagggtctatgaaaagattgatttctttttatgttttatttgttgacatttgaacacaaactatgtaagtgagggagtcgatttgaaagggagaagagcaagttcaaacacattcaggtgaggtcatgctttacatgttttaattgaaatgatccatcttgggagtagatcaataactgagatggtgccaggaatgttaaaaagcttttgtcagtcctaaatattgacaaataaaatttaattaaagtcttagaagaaaacacaaaggaaaacttcacaacatcggatttggcagtgattctttagatgtgacaacaacggcacaggctactacagaaaaaataaacaagttagactttatgaaaattttgaaatattgtgactcaaaagacaacatcagttacttcacatggcaaggaaaaagaacttttaagacgatattatcaaagtaaaaagacaacccacagaatgggagaaaatgttttcaaaccacaccacctgtaagggattaacatccagaatatacagacaactcctaaaactcaatcacaataaactcaattcaaaaatgggcaaagtactgaaacagacatttctccaaagaacatacgcatgaaaagatattcagcatcacgaatcattagggaaatactaactaaaactacaccagatgccatttcataccccttaggatgggtatcatcaaaacaacaacaacaacaacaacaaagtttctatacattaacaacaaactatccaaaaaagtttacaagaaaataagcccatttgcaataactacagaaaacaaaacatgcaggaataaattcacccaaggagtagaaagatctgtatgcaaaagctataaaacattgatgaaaaaactcaagaaataaacaaataaatcgaaagatattccatgttcacggatcagaaggattaatgttgttaaaatgtccattctatccaaagtgattcaatgcaaccattatcaaaaatccaatgacattttttttacagaaatagaaaaaacagtcctaaaattcatgtggaaccacaaaagatctcaaataaccaaagccatctagagggaaaggaacaaagttggaagcatcacattacctaaacacaaactacattacaaaattacagtaattaaaacaacacagtacttgcataaaaacagacacatagaccaatggaagtgattcatagcccaggaaaaaaatgcatgcatttagggtcaaacaatttttgggatgtgtcaagaacacacaatggagaaggaacagtctctttaataaatgggattgggagactgcatgtccacatgcagaagaatggaagtggacatttgcctcacaaaacatacaaagtcaactcaagatagattaatgacttaaatgtaagatgaaagactataatcccagcaatttgggaggccaaggtgggcagatcacctaaggtcaggattccaagaccagcatggccaacatggtgaaatcccgcctctactaaaaatacaaaaacagctgggtgtggttgtgggtgcctgtaatctcagctactcgggaggttgagacaggagaatcacttgaacccaggaggtagaggttgcagtgagccgagatcgcaccactgcactccagccggggcaacacagtgagactccatcttaaaaaaaaaaaaaaaactactaaaagaaatcaagggaaaactccactggcttgggcaaaaccattttggatattaacccaaaggcccaggcaacaaaagcaaaagtagacaaataacattatatcaaattgaaagtttctgcaaagaaaaaaaaaactcaacaagtggaaagacaacctatggaatgggagaatatatttgcacccatacatctaataaggaattaatatccaaaatatataagaaactcaaacaactcaatggtaagaaatcaaataacccaacttaaaaaaatgggcaaagtatctgaataaacatttctaagaataagacaaatcaccaaaaggtatatgaaaaaatgattagcattactaaacatcagctaaataaaaattaaaactagaatgagatatcacctcacacctcttagaatgaccattaacagtctgggcatggtggctcatgcctgtaattcaggcactttgggaggccgaggcagggagattacctgaggtcagcagttcgaaaccagcctggccaatatggtgaaaccccatccctactaaaaatacaaaaattagcagagtttggtggcgcacacttgtagtcccagctactctggagactgaggcaggggaatcgcttgaacccaggaggcagaggttgcagtacaccgagattgtgccactgcactccagcctgggtgacagagcaagactgagtctcaaaaaaaaaaaaaaaaaaaagaccattatcaaaaacataaaaaataacaagggttaacgaggatgtggagaaaagggaacatttgtatgcagttgatgggaatgtaaattagcacaaccattatggaaaacagtctggaagttcctgaaaaaattaaacatagaattcccatatgtgtctgcaatccaactactgcgcatgtatccaaaggaagtggaatcagtatgttgaagagatatctgcattcccatgtttacagccgcattattcataacagccaagatgtggaatcacccttactgcccatctatgggtgcatggacaaagaaaacgtggtatacgataggaacgtaatgaagtactatacaacctttacaacaaagaaggaagtcctctcatttgtgacaatgtgaaaaaacttagaggacattatgttaagggaaacaatccaggcacagaaagacaaatgccacatgatctcatgtgtggagtgtaagaagtggaacctagaggaacagtaaaatggtcgtcgaaagaacctgggatggagagagattgaagagatgttggtcaaaggatgcaaaatttcagttagaagaaatcggttcaagagatctattgtatgtcttggtgactccagttaatagcaacatatggtgtattgaacattactaagagattagattttacatgttctcaccacacacacaaaacatacaagtatgtgaaaaaataaatatgataaagaggttgtttcatccattccacaatgtgtacctatatgaaaacatcatgatggacaccacaaatacccttttcctcattaattaaatttgttttggttttttttttgagatgcagtttcactgttgttgcccaagctgaggtgcaatggcgtgatctccgctcactgcaacctctgcctcccaggttcaagcggttctcctgactcagcctcccaagcagctgggactacagttgcgtaccaccccgtccggctatatttgtgtttctagtagagacagggtttcgccatgttggccaggctggtctcgaactccagacctcaggtgatccacccgcttcgccctcccaaagtgctagatttcaggctgagacaccacacccagcctgtacattgactttctgcccttaaactgtgctgaagtttgtttctcagatgtaggagcctttgggcagagactatggggtttctaggtatagaaattatctcatcttcaaacagaggtaatttgactacctctctctgctactctcttcttacttggatgccttataattctttctctttcctgatggctctgtctaggacttcaagtactatgttgaataggatggtgagagtgggcattcttgtcttgtttcacttatgaagggaacttcttccagcttttactcattcagtatgatgttggttgtgggtttgtcacaggcggctcttattatattgagttatgtttcttcaatgcttagcttgttgagggcttttaacatgaagaaatgcttagtaaaaagtatgttctacatgtgtgttgagaagatcatgtggtttttgtttttagttttgtttaggtgatgaatcacatgtattgattgtgtatgttcaaccaaccttgcaccctaagaataaagttgacttgatcatggtggattcactttttgatatgctgcgggattcagttcttagtattttttgtggatttttgcctctatgttcatcaggaatattggcatgtagttttcttttgtttaatgttcttttctgtctttagtatcagggtgatgccagccttatagaatgagtaaaggccaccctgggcaaacagtgagacccatccctttttaaaaattatgagttttacaaatttaaaatgcatagtgaaaaagttcttacaaactccagaaagataggtgtaaataagagacatttgtaagaatgacagcacattaaatgtgtagatttcaaccttcagttattgcaatattccagtatcaagttggaggatgttatcagtctgatattttttcctcaaatgagagagagaaagaaagacacacaaacaacacagggagaaaaaaagcacacgttacagagagacaaaaagggagacagggaactgtgaatttggactcttgtgtcataagacaaattctagataacacgaccagaccttcaattgacatattgtgtttttgctaataaggtggaattctatgatgcgaaataactatatagtcttttctactgggatttaaatcattttatctgtttctggcttaacaggaaaaatacaaccatggaaaattatgatgatttatttaatacgattgctctatagtgttaataaaacctattaggtattttgcatattacatatcaaggagagtttgaatctcaggtagaaacaaaaaaaaatacatcaaatttcctcatgtgagtgcagaattcaatcgtcccgtgcaggggtaagtgagtctgagatgtgttttgagcctggccgttgcgcatgatgtgaagtgacaagtctagtctgcagttttcagaaaccctcattcctcccttgactgattcaccacttgaacctcatatgacgtagaagaagcctacctatgtccccttcacatgttgtggtcaatgtgtcaactgcacgatccgggcccctcaccacatcctctgcaccggtcagtcgagccgagtcactgcgtcctggcagcagaagctgcaccatgtccatgtcacccacggtcatcatcctggcatgtcttggtgagtcctggaagggaaggagcaccagggttacactatgggcctgcagattgggtgtctccccagcagagagccatgttctgaagcaagtgagtggtgaggatgagttaattttcagtccagcgtggcgcccagtggctcaggaggaaagggtaggttgctgccgagatgaatagttcatcatgatctttctttgcagggttcttcttggaccagagtgtgtgggcacacgtgggtgagtccttccccaaatgatgggttgccatcttcaccccaatacaagtgaattttccagaaatgggagggaggcagcacagagggtgggctgatgggctgaccatgggaaggcctggggggagtctctcatgaactagtaagaggagatcctgggagtctctcatgaactagtaagaggagatcctgggagtctctcatgaactagtaagaggagatcctggtatgctcagccctctgttttgtcttagccctccccagcctttcttccccatggctgagttgagctctgtgtggcccaggcgggatactgaggtgctcaaagctggggtgtgtggggggatgtggtgtcaccgacagaggagggaagggtagcagtgttaggaacagcaggtcctctgaggacaagagggtaactcacaccctccagcgtttccatgacggtaggggctgcagtgtggctgctgtcattctgccagaagaggtgggggaaccacagccacgaccctgccattccaaatcctctgatggagctcagttgtttattgtggttcaggcattagctaatattccattcacaaaggtcataccctccaccccatgtctactttgtgttctttggtgtaactaatcttgcagtattaaaatctagtaagagtcccttactcagcacctgctcagttctcaactgacacttttgttgtagggagacgccacgtctatgcgggatgggtccttcctgtagccccaggcacccaggtgtggtaggagccttagaaagaagaaatggggagaatcttctgagcacagggagggaggggcagctcaacatactcctctctgaggcggcatctccttctccccaaggtggtcaggacaagcccttctgctctgcctggcccagcgctgtggtgcctcaaggaggacacgtgactcttcggtgtcactatcgtcgtgggtttaacatcttcacgctgtacaagaaagatggggtccctgtccctgagctctacaacagaatattctggaacagtttcctcattagccctgtgaccccagcacacgcagggacctacagatgtcgaggttttcacccgcactcccccactgagtggtcggcacccagcaaccccctggtgatcatggtcacaggtcagagggctcctgtctgggcttctccttgtcccacctcctgagtcccagagcttctggtgggggtgtccaccagagtccgatcatccaggccccaactatatttggggtaaagggggattgaatacaggggaatgggtgctgtgttggaaagaataactgtccccatcgatggccacattgtaatccttggagcctgtgactatgttatagggcaggggactgaaggggaagatggagctcaggttgttgatgagttgaccttgagatggggagatggcctggactctcccactgggctcagtgtaatcacaagggtccatatgagtggagaaggaagaggagaatggggattagagcagcatcgtgggatactccaccagccactgtgggctttgaaggtggaggaagaccacgagccacgaaggggctggagaaatcaatggaactgattctcccgagtctccagagggaatgcagccctgcagatgccttgattgtagcccaggaagaacagggtctgatttctgtctccagaagtggaaggggtcagtgtgttctctcctgccgccatgtttgtgataattttctccagcaacaacaggaaaccaacacaggaacccaggtgaaggacaagttaaaaaaccaaacaagaaggttggctaccctgagatcagcaagggtgcactgctgatgccaccaccaggctggaaccacatagggagggatcgacaggaagagttgggggtggagggtgagagagagagagagagcactaggccatagagcagggcagtgagttctcagctcaggtgggaggggagctgtgacaaggaagaacctccctgaggaaactgcctcttctccttccaggtctatatgagaaaccttcgcttacagcccggccgggccccacggttcgcgcaggagagaacgtgaccttgtcctgcagctcccagagctcctttgacatctaccatctatccagggagggggaagcccatgaacttaggctccctgcagtgcccagcatcaatggaacattccaggccgacttccctctgggtcctgccacccacggagagacctacagatgcttcggctctttccatggatctccctacgagtggtcagacccgagtgacccactgcctgtttctgtcacaggtgaggaaagccaatgtctgtcccatgtcctatggtcctagagccttagctgaggagcttcctgctgatgatggagagaagcatggacagatgtggagagaagatgcagcatggtgtgagggtgggatcagggcacaggatggcagacagggcacctccaaaccctcctgcatggcctgcatggaagcttgcagtaagggctccgggtacccaggcagatggagaaagtggtcaggacagacccagaggagggagactgggctcagtttggggagatcagaggttccctcagcccctcaaccttacccatttcccagaagcccaccctggcctctcacctacacagagatgtcatcaccagcaacccctacactttttcttttcctttgaaaaaatgctgattgaggttaaatatacctatataatttatcaactttaccatttttaagtgtaaaatctagggatcataaatacctttatatgctgtgtgcggtggctcatgcctgtaatctcagcattttgagacgccaaggcaggtggatcatttaaaatcaggggctggagaccagcctggccaacatgggggaaccaatctttactaaaaagacaaaaaaaataaaattagccaggcatggtgccaggcgcctataatcccagcaacttgggaggctgaggcgggagagtggcttaaacccaggaggaggaggttgcagtgagctgagatcatgccactgcactgcagcctggtgacacagagagactctgtctctaaataaataaataaatacttttatattcttcttttgttaccctccaccccttccttcctaacctctggtatccaccattctactctctaccttcatgaggtccaccttttacatcctgcatgtgagtaagaaatggcaatccttgtaatgacctccagtccatccatgtggctgcaaatgacaggacgttactctttgtatggatgagttgtctccattgtgtgtatgtactactttctctctatccattcatccactgatgggcaggtaggttgactccacatcttggctactgtgaacagtgctggaacagtcatgggagtgcagatgtcacttcaatacactgaagtccttttctttgcatttacacccactagtggaattgctagatcctctggatgttctctttttaggttttgttttatgctttttgtttttttgacatagcgtttcactcttgttgcccaagctggagtgcaatggcaccacctgggctcactgcaacctctacctccaggattcaagtgattctccagcctc[134 bp omitted]cagcctcccaaggtgctgggattacaagcgtgagacacagtgcctaatctctttttagtttttaaggaacttccatattcttctcctctgtaatggctgtattaatttacattcctatcaacagtgtattagggttctcctttctccaccaccttgccaacatttgttttgtctgtctctgagataaaacccattgtaatggggtgagatgatagctcattgtgacttcatttgcatttctctgatgattagtgatactgagcactttttcatatatgcaatgtatatatgttcatttgtatgttttgttcattgagaaatgtctgttcaggtcttttactaattttataattaaattattagttttattgaggtgtttgagcttcttttatattctagttattaatcccatctcagatgcatagtttgcaaatatttgctcccattctgtgggttgtctcttcttcacttcattggttgcttcctttgcggtgcagaagctgcttgatttgatataatcccaatggtctatttttttgttgttgttgtgattacttgtgtttttgaggttttaaacaaaatgtcttccctcagacaaatgtcctggagcatttctccagtgtttccttttagacatttaatggattcaggtcttaagtcattaatccattttcatctgatttttgtgtatggtgagaggtagaggtgcagtttcatccctctgcatgtagatatccagttttccctgcaccatttattgaaatgactgtcctttccagattgtagattcttcgaacctttgtcaaagtccattggatgtaaatgggtggattacatccgtgttcttcattctgctccattgttttatgtgcttttctttatgccaatgtcatgttgttttgcttactacagctctgtaacatatttttaagtcaggtagtgtgatgctcctgttttctccttataccttgaagtctcaagatagttggtgtcacctacaatgattatggagaatgggatgccaggactcccagggcccaacattagataatagaatgttggccatgaaccaacctcaaagatttccattgagtagaagacaggcatcctcattgccacacctctctcctgtcccgtgttctaggaaacccttctagtagttggccttcacccactgaaccaagcttcaaaactggtaagtgaaggacccctcttatctctgcttttggaaacctggggaggtagaagccttggattcaagcgttggctcagcacctgccagctctgtgattgtgggcctgtcttccattgtctctgaaccccagacactccaacagcgaaagggatctgggcccagcacagggctcagtgaaatctcttaatctctaattttctgctgctgagacctcagggtagaaggatgagtgcaaatcagacattcttctcaggaaaaatgctgtgtttgttctgcctgcattcctaactgggaggacaaatgcctgggggcttgagaaggggaaggaaggggaacatttttgagggtggtgtatttgtagagaagttctacttgccaaggaatgagctcctgtctgtcatgatccaaccctggttgacttagtggaacaagagctttgcggtaagagagaacgtagttcatccgtgcacatgacacttccacttactcgttcagccactgccccatgctcagactgtgcagtgtggaaccttttcctatgttgccataacaaatttccacaagcttcgtggatggaaaccacatttttaaaaaatatctcatggtgctgtagctcagaagtatgaaatgcatcatctcactgggctaaaatcaaggtgacagcaaggctgccttccctctgaatgttccaggcaagaatctgcttcctcacttttcccagctcctagaggctcccacattccttggctcctggtccccgtcttcctccctcaaagtccacaaaggctggtcacgcctctcacacggcatcactcagacccttcttccttgtccacacctctttctctgaatgctgctctgccttcttcctcatcttttaaggactttggcattctattggaaacaccaagataatccatcataatttccctaaaatcatctaggataccctccttttaaggttagctgattagcaaccgtaattccatctgcaatctgcattccttttttccatgtaaaataacatattcacaagatatggcgactaggacaggaatattttggggtggggcggcattcttatcctttccacaaatggtaaacaaggtgcatttggcctctgctcttggacactgatattgcaaaggattaaatgggagggcagaaaatgaatgcaccagtggaccaataaatgaatgatccattgggaagcatctgtgcatgagaatgattgattgattggttgtttttatgagacagtgtctccctctgtgccccaggctggagtgcagtggcgggatctcggctcaccgcaacctccacctcccaggttaaagcgattctctacactcagcttcccgagaggctgggattacacccatgtcccaccacgcctggctaatttttttttggtatttttttttagtacagacaaggttttaccatgttgcccaggctatctcaaactcccaaccttaagggatccgcccgtctcagcctcccaaagtgctgagattagaggcgtgagccaaggcgccgagccgtattttaaaagaaataatagataatgctgagtgtataatttcgggtgacagagaagttctcactgatcaaataatacttgtgaccttaatgaaaaaaatagatcaacccctggaagattggcggaaggattttccacacagctgtcagccgtgaaggcacaaaggtgaaaacaatgttatgtggaaggaagaggctctgcctgaaatgctgggaatgacatggggagaatgacaagacgactgtggagagacagagagcacactgggtacacaggaaactaaggagcaacaaggagcgtgtgtttgatactcacagccattggacttacctcggggctaactgggaatccctacatgatgaatagtgactgacatgaaaataagggaggcccaggtgcataactggaatctaggagactgtggaaaaggcaattcccgcccccctggtgaaatgtggtgctgatttagacactaaatgaatgaaagatggacacaagatgtgtttgtgaggtagagtaatttgcagggagggcttgcctggtttgatttttcctaattgtttaatcttcacttcattgatttctttctgagatttatttttcctacatgtaaatcaatacttggcagaggagtgagagatacatgaggggtggtgcaaaggaagagacctattataatataacacacaaggttctgaacggtggctcacacctgtaacccaacattttgggaggctgaggaggctggatcaagtgagatcaggagttcgagatcagcctggacaacatggtgaaaccccatctctactaaatatacaaaaactagctgggggtggtggcgcgtgcctgtaataccagctattcgggaagttgaagaaggagaatggcttcaaccagggagggagaggttacagtgagccaagatcgcgtcattgcactgcaccctaggtgacagagtgagactccatggcaaaaaataaaaataaagaatacataaatataatataacatacacgaatgacaaaggcacaccaattccaatcatcatttttctatttctctataatgacttctttgatcctttatcctatccgtaagaaaatcaggcgaaaacatcttccttatttggctttctgtgagcatgagatcatatggaaaatgtgaaacccaccagcacaggtcctggaatagagaacgtgatctgttcatggcacaaaacttgccccttcacccaaatcccccacctcacccctacttccaatcacattaatgatacagatagatcatggggaggtaaaaactaatattctttggagttcagatcgtagactcagagaccagtgccagcactatctcctggtcaccttttggagtaattcacagaaagacaggctgtattgaagcaacagatgatggagggggtggtctttcccccagactctcgggtggaacagcagcctaatatctgactcccaagatgacaaaagtagcatgttgcccacgagcttcatcattatttcctggctgtttgatataagacagctcaacctcacttatgttgatttcaatgtcactgttttttccttttcttggagaatgtaatttgtttgagtcaagagggttgtggatgtagaaactgtaaagcacattcactgtgtatcaatcccagtccagtcttcccagagaagactctaaacacctcccatactgcacctggggctgtgccaatttctatcactcaccatcactccagggagacagaacacacagggaatacattacataggcaggttcattacttatagataagcagcgagtgacaacagaaaccttcctttcagggtgagccagtccctcaaggctcagaaaaactgctcaggacacatggagtcacttcatgtgcactgtagctgggggaagccagaaagcagcccagcctgggttttgtaccctggagccacagggaacactcagctaaagcactgcatgatgttctcctccaggaagaacaggaagacagcccaggctgttctgagacgttcctcctgatctcaggatgttgctgtcttagcctatttttgttgctataaaagaacacttgagcctgggtatcttctaaagaaaagagatgtgtttggctcactgatctgcacgctgtactagaagcaggacactaccatctatttctggctgcggcctcaggctgctcccacactgacagaagagaagggggtcctgcgtgtgcagagaccacagagatcacatggcaagagagggagaaagggggtgtgatggagcttccaagctctttttaagaatcaactctccagggtactaatagagggagaacttgctaaccccgtcctctggggacagcattaatctattcatgatggatccacccccatgaccaaaacacccctcccaataggcacaactcccacactggggattaaatttcaaagtggggtttggaggggtcaaacattgaaacaatagcagttgtatcatcagcacattctattgttattatgaaaactataacggagaaagcaggagaaagctgggtctcccgcctcgtgggtgcttgtcttaaagaggtgttttatgtggttgcctggcaaccaagaaatgagagacaatccacaaagaggaactgctatggttagcttcttattggattcccatcttcctccaggtatcgccagacacctgcatgctgtgattaggtactcagtggccatcatcctctttaccatccttcccttctttctccttcatcgctggtgctccaaaaaaaaagtaagcctcacgaagcagaggccagagaactcagggccctgtgcggaagcaggatgggagcacgcaggtgtgtgttcctcactggcaggaaagtctctggcccaaggcaggagccagaggcagagctttctagagagagcaccagacaccctgcccctgccttcagctcacagaccgttgcctgattgtgaactgtatcctcacgtcccctgcagccactcacatccaggagaagattccatgacaggcagaaagtgggagatagaatcaatgggatgggaactgacagctattcatggaatggggtcttgcactcagagagatggaatgtctgagtctggctgttggcagctgagggacctcaggcacctatggcctccccctgtgtgttggtatctgttcatgaaatgaggacccagaagtgccctcccagctgttttgattgcttccgtctcctacagatgctgctgtaatgaaccaagagcctgcgggacacagaacagtgaacagggaggtaggtcctcctagcccagcctcatggatacagtcttattccgaaatagtcctgaaaaatgtgaacaccctccctcactcaggatttccctctctccaggactctgatgaacaagaccctcaggaggtgacatacgcacagttggatcactgcattttcacacagagaaaaatcactggcccttctcagaggagcaagagaccctcaacagataccagcgtgtgtatagaacttccaaatgctgagcccagagcgttgtctcctgcccatgagcaccacagtcaggccttgatgggatcttctagggagacaacagccctgtctcaaacccagcttgccagctctaatgtaccagcagctggaatctgaaggcgtgagtctccatcttagagcatcactcttcctcacaccacaaatctggtgcctgtctcttgcttaccaatgtctaaggtccccactgcctgctgcagagaaaacacactcctttgcttagcccacaattctctatttcacttgacccctgcccacctctccaacctaactggcttacttcctagtctacttgaggctgcaatcacactgaggaactcacaattccaaacatacaagaggctctctcttaacacggcacttagacacgtgctgttccaccttccctcgtgctgttccacctttcctcagactatttttcagccttctggcatcagcaaaccttataaaatttttttgatttcagtgtagttctctcctcttcaaataaacatgtctgccttcattctttaggtgactctttttttggctgaaagtttccagtgttatcattaccatgtccaaataactccaactgttctccactgggttctcacccctggacttggagcttctggaagcagggtggagcctgatttgtctctgagactccaatttccatccaaagatgcagcacataagaggttccaaggatcgtgaatcacatgaacaagtgatattcttactctctgcagacctggaaagctggcagagtcattccatgatgaaacatttgtagagtcataggccttgttagtctcatctccacggggacacatatcaacacatcatctttcatactataaatatacagtcggtcctctgtatctgtgggatttacaggtgtttattgaaccaaatataaatcaaaaatattcagagaaaaaatccacaaagtttcaaaaagcaaaactatgttgaatggacacaaatgaagctgtgtgtaggctgtatcaggaattataaataatcaagggatgatttcatgtacacaggaggatgtgcatgggttatttgcaaatgctgtgccatttcatgtaagaggcttgagcgtctgcagattgtgctatctgagtggagatcctgaaaccaatcacccacgaatagtgagggatgactgtatataatttttatttctcaattttaaatataaaacataaaaaaattacaataacaagataaaataaacaagtgttttatagtgtgagaatacgtttagatatatttttctctatgtgtaacccttgggcccatgttatttattgagaagacattctattccaccttaaaccacatggcagcctttgtcaactataaagggactgtgtgtacacggatgtattttagacactgttttctgctcagtggctctctctctgtccactctcttgagaatgctgcattttatgcagccttatacaacccctaaaatttggtagctggagtcctctagttatttattataggctatttgctatgctttttttatttttcttgaggcagagtctcgctctgttgcccaggctggagtgcagtggcacgatctcggctcactgcaacttccgcctcccaggttcaagggattccgtgcctcagcctcttgaatagctggcattacaagtgcctgctaccaggcatggctaatttttgtatttttagcagagacatggtttcactatattggccaggctggtctcaaactcctgacctcggttgatcactcacctcggcttccaaagtgctggggaaattgattttctatagcattatgttactggatatttctgtaaaatttaaaatgagggaggcagagagacagagagagagcaaaccatgagttggaactctggaatcttgggacatgagacaaattctagataaatctacaaaaatccagaatttacatgttgtgatttttgctgataaagtacaattctaagattgtaaataattgcataatccttccctgggagtttaaatcatttgaactggttctgctgtaatactagaaatacaatcatgaaaaattctaatggtttattgtcacaattgctctgaaaaccttaataatacctattagatattttgcatattacacaggaagaagagtttgaatctcagataaaaacaataaaaatacatgaaaagtctttcatgttagcacagattttaggcatctcgtgttcgggaggttggatctgagacgtgttttgagttggtcatagtgaaggacgcgaggtgtcaattctagtgagagcaatttccaggaagccatgttccgctcttgagcgagcacccactgggcctcatgcaaggtagaaagagcctgcgtacgtcaccctcccatgatgtggtcaacatgtaaactgcatgggcagggcgccaaataacatcctgtgcgctgctgagctgagctggggcgcagccgcctgtctgcaccggcagcaccatgtcgctcatggtcgtcagcatggcgtgtgttggtgagtcctggaagggaatcgagggagggagtgcggggatggagatctggacctggaggtaaagatatgggcctagaggtggagttatgggcctagaggtggagttatgggcctgaagtggagatctgggcctggagtggagatctgggcctggagtggagataggggcctggggtggagatatgtgcctggagtggagatctgggcctggagtggagatatgggcctggggtggagatatgtgcctggggtggagagatgggcctggaggggagatatgggcctggaggggagatgtgggcctagaggtggagtgatgggcctagaagtggagcgatgggcctggagtggagatatgggcctggaggtggagttatgggcctgcagtagagatatgggcctgaagtggagatatgggcctggagtggagatatgggcctagaggtggagttatgggcccggaggtggagttaagggcatgaagtggagatctgggcctggagtggagatatgatcctggagtggagatatgggcctggggtggagatacgggcctggagcagacatacaagcctggaaaggagatatgggcctggagaggagatagaagcctggagtggaaatatgggcctggagtggagatatgagcctggagtggatatatgagcctggagttgagataggagcctggagtggagatatgggcctggagtggacttaccagcctggagaggagatatgggcctggagtggagatacggacctggagtggagatctgggcctgttgtgtagatctaggcctggaggtagagatctgggcctggaggctcagtctctgcacagccgagatccttgttcctgggggcaggtaggcagcgagggtgagtttaccttcagcccagcaagggcctggctgccaagacgcacagcccagtgggggcagcagggtgccctggtttgcctgcagagggatggtccatcatgatctttctttctagggttgttcttggtccagagggccggtccacacatgggtgagtccttccccaaaccttagggtgtcatctccccacataagaggattttcctgaaatgggagggaagtcctgtcggggagtctctcatacactaggaagaggggaccctcggatgctcggcccacatttctgaccttgccttccccggcctttcattccctttcctgagtcaagctctgtgaagactggggtgagactagggtgctccaagatgggtgtgcagggaggaagtggtgtcagcagcagagaaagagagggaagcagtgctaggaacagcaggtcctctgaggacaaaggtgtaactcacaccctccagcgtttccgtgatggtaggggctgcagtgtggctgcggtctttctaccagaaaaggtgaggaaaccacagccatggccctgacattccaaatcctctgatgggggctcagttcatcaattggctgatattccattcacataggacttgccctccatgccgtgtctactttgtgttgttttatatgagtaattttgcagtattaaaatctagtaagagttgcttctccagcaacttgctcaaagttctcagctgacacttgttgtagggagacgccaagtctatgcaggatgggtccttcctgtagccctgggcacccaggtgtggtaggagccttagaaagtggaaatggggagaatcttctgggcactgggagtgaggggcggctccacatcctcctctctaaggcagtgcctccttctcccccaggtggtcaggacaaacccttcctgtctgcctggcccagcgctgtggtgcctcgaggaggacacgtgactcttcggtgtcactatcgtcataggtttaacaatttcatgctatacaaagaagacagaatccacattcccatcttccatggcagaatattccaggagagcttcaacatgagccctgtgaccacagcacatgcagggaactacacatgtcggggttcacacccacactcccccactgggtggtcggcacccagcaaccccgtggtgatcatggtcacaggtcagaggctttccgtctgggcttctcactgtcccacctcctgaatcccagagcttctggtgggggtgtccgtcagggtcccatcacccaggccctgactgtatttggggtcaagggagattgaatacaggggaaatgggtgctgtggtgggaagaatcactgtccccaatgatggctacattgtaatccctggagcctgtgactatttatgttacagggcaggggactgaaggggaaggtggagctcaggttgttgatgagttgaccttgagatggggagacagcctggactgtcccactgggctcagtgtaatcacaagggtccacatgagaggtggaggaagaggggagtggggattagagcagtgtagtgggagggagacgctatcagccactgcgggctttgaaggtggaggaagaccactagtcacagaatgcaggtggcctctaagggctggagaagtcaagagaactgattcgctgattctccagagggaacgcagccctgtagacaccttgatttcagcacagggagaactggatccaatttctgtctccagaagtggaaggggtcagtgtgttctctcccgctgccatgtttgtggtaattttctgcagcagcaacaggaaaccaacacaggaacccaggtcaaggacaagttaggaaaccaaacaaggatagccagatgtggtggtgggcacgagtaatccaacgactggggaggctgaggcaagagaatcacttgaactggggatttgttcaaaagagattgattcaggctgctaagagcctggacatgcagcctgtcctcttccacccccacatagacagcaggaaagagattagtgggaaacagatacaacagcccaagagatgaggctgtcttcacagtggcaagggagtcaggggctactggagacagagggacagagaagagggaggaagacagatggaggcacctgcaccaggggatatgggcacagaaaagacacggagatgcagagagggaggagagagacagacacggggaggggaaccctcactcattccaggtgccatggatgggatgataaagagagatgccttctaaactcacaacttctctttctaggaaaccacagaaaaccttccctcctggcccacccaggtcccctggtgaaatcaggagagagagtcatcctgcaatgttggtcagatatcatgtttgagcacttctttctgcacaaagaggggatctctaaggacccctcacgcctcgttggacagatccatgatggggtctccaaggccaatttctccatcggtcccatgatgcttgcccttgcagggacctacagatgctacggttctgttactcacaccccctatcagttgtcagctcccagtgatcccctggacatcgtggtcacaggtgagagtgtctagacattgttctcattgtcactgggacacagagtgaatgatccaggacttggaacccccaggtggtcatgaggaagataagtgtgggattcttatggaaagagagtgacttggtgaggtctgtaccaacagagacagagaaacaggagacataagtacagaacaggtgtcataacagaggacagacacaggggccatacagggaggtagaaaagagagaaagaggtaaaggagacactcagacagacagacatgtcccagagagaggtgtccttccatgctgactttgctcagagacctggcacaggttagaagtttcatttctgttttacctccacaaagtgttcctaccagaagaacccaaggacacccatatttctgacctgagttgggccctgtggcctcaggccttgtgccacctacagatgccgtgtttattctgacacctctgccttccatgcaatggagagtaatcatcccaggatatcatggcccctgaacaccaacccctgtatgctgtgtgaacttggggtccccagactggattctgaggctcatattccaaataatcccacatatgataggatcgctgagagacacagagaaaaatcagggacaccaaaaagcaaagacataaacacacacaaaatgagccagaagaaggagattaagagattcacagacacataaaaagaaagaaaagagggcagaatggagagaatgatggaaaggaggagagaaaagccccaaaatcagaaccctgagggagggacacaaagacagagaaagataaatatgtggggatggattgcagagattccaaatagaactagagagactgagaggcagagaaagacaaggagacggagagagagagatgatagatggatagatagacgtagatagatgataaataggtagatgatagataatggattggttatagatacatagatgatgactgatagatgatacatagagatgacgatgatgatgatagacacatagatatatacatagatgatacataaatagagacagagaggcagacagagaggtaatagagagagagatagatgatacatatatagataatagatgattgatggatagatagacagacagacaattgatagagagatagataagtgatacataaatatagatgatagataatttgtagatagacacaaaatagataaatagatagaaatgtgcagaaagttatgaacaagacagaaagtgagagactcaaaattaaagaaaaaggaagatcaagtcaaccaatccaaggagggtcagagagaataaaacaatccaaaaagggaaaacatacctcagggtggggaagtgaggtcatagacctagagagacagaaaaggtagaaggaggaaacagatatgaagagagatggggtggagggtgagagagagagagagagcattaggtcatagagcaggggagtgagttctcagctcaggtatgaggggagctatgacaaggaagaacctccctgaggaaactgcctcttctccttccaggtccatatgagaaaccttctctctcagcccagccgggccccaaggttcaggcaggagagagcgtgaccttgtcctgtagctcccggagctcctatgacatgtaccatctatccagggaggggggagcccatgaacgtaggctccctgcagtgcgcaaggtcaacagaacattccaggcagatttccctctgggccctgccacccacggagggacctacagatgcttcggctctttccgtcactctccctacgagtggtcagacccgagtgacccactgcttgtttctgtcacaggtgagaaaagcccatatctctctcatgtcctatgatcctaaatccttagctaaggagcttcctgctgatgatggagaaaagcatggacagatgcagagagaagacacagcaggtgtgagggcggagtcagggcgcaggatggcagacagggcacctccaaaccctccttcatggcctgcatggaggcctccgatcagggctccaggcacccaggcagatggagaaagcggtcaggacagacccagagaaggggagactgggcttagtttggggagatcagaggttccctcagcccctcaatcttatccatttcccagaagcccatcatggcctctcacccacacagagagatatcatcaccagcaacccctacacccttttcttttcattttcaaaaatatttattgaggttaaatgtaactatataatttaccacctttaccatttttaaaagtaaaatctagtggtcataaatacctttatatgctgggtgtggtggttcacggttgtaatctcggcgctttgagaggccaaggaaggtggatcatttaagatcaggaactcgagatcaccctggccaacatgtgggaaattcatctttactaaacagacaagaaaaattagccgagcatgctggcatgcacctgtagtcctagctacttgggaggctgaggcaggagaagcacttaaacccaggaggcagaggttgcactgagccgagatcatgccactgcactgcagcctgggagacagagagagactctgtttctaaataaataaatacatctatattcttttttttgttaccctccacccttcccttcctggcctctggtgtccaccattgtattctccaccttcatgagatccaccttttatctcctgcatgtgggtgagaaatgggaatctttgtaatgacctccagttccatccatgtggctgcaaatgacaggatgttattgtttctatggatgagtagtctccactgtgtgtgtgtaccacagttctctatccattcacccactgatgggcaggtaggttgactccacatcttggctactgtgaacagtgctggaacagtcatatgagtgcagatatcacttcgatacactgatgtcctttcctttggatataaacccagtagtgaaattgctggacactatgaaagttctctttttttttttttcttttttgagaaagagtttccctccttagtccaagctggagtctaagtggtgagatcttggctcattgcaacctgtgcctcctaggttcaaatgattgtcctgactcagcctccctagtagctgtgattacaggtgcacgccaccatgcctggctaatttttgtatttttttagcacagacgggatatcccaattttgggcaggctgctctcaaactcctgacctcaagtgaggtgcctgcctcggtttcccaaagtgctgaagttacaggcataagccactatgcccagcctccttttagttttttaaagaatttccatacttttctccataatagttgtactaatttacattcctaccaacagggtaccagggttctcctttctctaccatcttgccagcatttgttttgcctgtcttgcagtaaaagccattttactttactttattttatttatttatttatgttgagatggagtttcactcatagtctcccaggctggagtgcaagggtgtgatctcagctcactgcaacctccgcctcccgcgttcaactgattctcctgcctcagcctccaaagtagctgggattacaggcatgtgccaccacgcctagctaatttttgtatgtttagtagagagggagtttctccatgatggtcaggctggtctcccgacctcaggtgatccgcccacctccgcctcctgaagtgccggaattacaggcgtgagccaccggcctaaaaggcattttaatgggatgagatgaaaactcatcgcgattgtaatttacatttctctgatgatgagtgatgccgagtactttttcatatacgtgatcgccatttctatgttttgtttgtggagaaatgtctcctcatgtcttttgctcgttttttaattaaattgttttattgagttgtttgagcttcttatatttccagttattaatcccgtctcagatgaatagtttgcaaatatttgctcctattttgtcggttgtctcttcactttcttggtttatcttttgtggtgcagaagttgcttggtttgatgtaatcctaatggtctattttttgctttgattacttgtgttttgaaggttttaaacaaaatgtctttcgtcagacaaatgtcttccccattattttcttctacatgtttcataggttcaggccttagactcatgtttttaatccattttcatttgatttttgtgtatggtgacaggtatagatgcagttttattcctctgcatgtagatatccagttttccccacaccatttattgaaaagactgtcctttcctgattgtaagttctcggcacct[134 bp omitted]tctactaaaaatacaaaaattagctgagcatggtgaccagtgcctgtaataccactactcgggtgtttgaggcaagagaattgcttgaatccaggaagtggaggttgcattgagctgagattgcacctctgcactccagcctgcatgacagagcaagattctatcacacacacacacaaaaaaagccattggatgtaaatgcatggattatatctgtgttctccattctgtttcattttttatgtgcctttctttatgccaatgtcatgctgttttgcttactacagctctgtaacatatttctaagtcaggtagtgtgatgctcctgttttctctttataccttcaagtctcaagacagtgggcatcgcacacaaaaattatggagaagaggatcccaagactcccagggtccaacattagataacagagtgttggccatgaaccaacctcaaagatttccattgagtagaggacaagcaccctcatttcctcacatctctcctgtcccatgttctaggaaacccttcaagtagttggccttcacccacagaaccaagctccaaatctggtgagtaaaggacccctcttatctctgcttttggaaacctggggaggtggaagccttggatgcaagtgttggctcaaacctcccagctctgtgaatgagggcctgtcttccaccatctctgaactccagacactccaacagtgaaagggatctagggccaccaaagggctcagcgaagtctcttaacctttaatgtcctgcaggtgagacctcctacaagctagaagaatgattgccaatctgacatccttctcaggaaacatgcagtgttttttcttcctgcattcctaactggaggataaattcctggggacttgagagagggaagggaagggaacatctgatgagggcgaggtgttttagagaagttccacttgccaaggaatgaattactgttggtcatgaagcaaccctggctgactcagcagagcaagagccttgccgtaacagagaacagagctcatgcacgcacacttcgactcactgactcattcagccacggccccatgctcaggctgtgcagttggaatcctttcctattgttgccataacaaatttccacaagattcgtgggtgaaaacaaaacggttttttaattatcttacagtgctgtagctcaaagtaggaagtgcatcttactgggctaaaatcaaggtgacagcaaggctgccttccctctgaggattccaggcaagaatctgcttctcacttgtcccagcttctaaaggctcccagttccttggctcctggtccccttcctccttcctcaaagcccacaaagactggtcacatctcacatggcatcactcagacccttcttccttaccacacctctttctctgaatgctgctctcccttcttccttatcttttgaaaacttggggattctattgggttcaccaagatgaaaatccatcataatctcccggaaatcattcaggatacccttgttttaagttcagctgactagcaaccgtaattccatctgcaatcttcattccttctttccatgtaaaataagatattcacaagctatggaggccaggacagggacattttggggtgggacagcattctcctgccttccacgaacggtgaacaagatgcatttggcctctgctcttgggacactgatattgcagatggttaaatgggaggacagaaaatgagtgcacaagtggaccaataaatgaatgatccattgggaagcatctgtgcatgaaatctatttgtttgttcgttcatttatttattgagacagagtctccctctgtcttccaggctacagtgcagtgtcacgatcttggctcactgcaacctgcgtctcctggatccaagtgattctcctgcctcaccctctcgagtagctgggattacaggcaactgccaccatgcccggctaattctttttgtatattttttgtagagaggatgtttcaccatgttggccaagcttgtctgaaactcccaacctcaagtgatccgaccatctcagcaacccaaagtactgggattacaggcgtgagccactttgcccagccagaattcaaaataaataatagataatgctgagtgtataattttgggtgacagagaaggtctcactaatcagatatttgtgacattaatgaaaaacacggattgaacccctgaaagattggcggaaggattttccacacacagctgtcagccgtgaaggcagaaagctgaaaacaatctgatgtggaaggaagaggctctgcctgaaatgctgggaatgaggtggggagaatgacaagacgactgtggagagacggagagcacactgggtacacaggaaactaaggagcaacaaggagtgtgtgtttgacactcacagccattggattcacctcggggtagccaggaatccctacatgattaatagtgactgacatgaaaataagggaggcccaggtgcgtaactggaatctaggagacagtggaaaaggcaattgccgccccactggtgaaatgtggtgctgatttagaccctaagtggatgaagcagatggatataagctatgtttgggaggtagaatcatttgcagggagggcttgctgggtttgagtttcctagttgtttaatccttgctaaattaatttctttctgagatttattcctcctacacataaatcaatacctggcaaaggagtgacagatatatgaggggtggtggaaatgaagggacctattatagcatagtatacaagtctgtgaacggtggctcactcctgtaacccagcactgcaggaggctaaggccagtggattccaagaagtcaggagttcgagaccagcctggccaacatggagaaaccctatctctacatggtgaaaccctatctctcctaaaaatacaaaaattagccgagcatggtggtgcatccctgtaatcccagctcctgctctggaggatgaagcaggagaatgacttcaacccaggaggtggaggttgcagtgagtggagatcgcatcactgcactccagcctgggtgacacaaggagactccatctcaaaaaataaaaataagaaatgcataaatataataaaacacacacgaatgacaaaggcacctgaattcccatcatcatttttctatttctctataattacttctttgatcctttatcttatccattaggcaatcagcctaaaacctcttccgtatttggctttctgtgagcatgagatcatatagaaaatgtgaaagcccgctgaatcctccagcacaaatcctggaatagagaaagtgctctggtcatcacaaaaaaaacttgccccctcacccaaatcccccatctcacccctacttccaatcacctgtggaaatacagatagatcatggggaggtaaatgctaatactccttggagtgagtccagatcttggaatcagagatcagtgccagcactagctcctgctcccctttcctactaattcacaggaggacaggtggtattgaagcaatagatagtcgagggggtggtccttcccccagcctctgaggtagaacagcagcctaacatgtgtctcccgagatcacaaagagtagcacatttcacacgggcttcaacactattttctggctgtttgacataagagaattctacttcgctttttttatattgatttcacttttgtttccttttcttggagaatgcaagttgtttaactcaagaatgccgtggatgtagaaatcctaaagcacattcgctgtgtatcaatcccagtccagtcttcccagagaagactctaaacacctcctggactgcacctgggcctatgccaattcctatcactcaccgtcactccagggagacagaacacacagagaatacgttacataggcaggttcattactaacagataagcagcgagtgacaacagaagcctacatttcaatgtgagccagttccccaaggctcagaaaagctgctcgagacatgtggagtcaccccatttgcagtgtagctgggggaagccagaaagcagcccagcctgggttttgtaccctggagccacaggaagcactcagctaaagcactgcatgacgtcctcctccaggaagaacaggaagacagcccaggctgttctgggacaatcctcctgatctcaggactttgctgtcttagtccatttttgttgctctaaaggaacacttgagcctgggtaacttctaaagaagagattggtttgcctcaccgttctgcaggctgtactggaagcatggcaccagcatctatttcttatgatggcctcaggccgctcccactctggcagaagggaaggagggtctgtctgtgcagagaccacagagatcacacggcaagagagggagcaagggggagggggagcaatggagcttccaagctctttttaacaaccagctctccaggaactaatagagagggaacttgctaaccccgtctccttgggacagcattgatctgttcatgatggatccacctccatgacccaaacacctcccaagaggcccaacctcccacactgggggttaaatttcaatgtgaggtttgaaggggtcaaacatctcaactaaagtagttgtatcctcagcacgttccatggttactatgagagctataactgagaaagcaggaggaagctagatctcccgccatctgggtgcttgtccgaaagagatgctgtaagtggttacctgtcaatcaagaaatgcaagacaattcatatagagaaactgctatgattagcttcttactggtgtctcctcttcttccaggtaaccccagacacctgcacattctgattgggacctcagtggtcatcatcctcttcatcctcctcctcttctttctccttcatctctggtgctccaacaaaaaaagtaagtctcacggggcacaggccagagagctcagggccatgtggggaagcaggatgggagcacacagctgtgtgttcctcactggcaggatggtccctggcccaagacaggagccacagaggcaggactttctagagagagcaccagactccctgcccctgccttcagctcacagaccgttgcctgattctgaactgtatcctcatgtcccctgcagccactcacatccaggagaaggttccatgacaggcagaaagtgggagacagaatcaatgggatgggaactcagagctattcatgggatgggtccttgagctcagagagatagaatgtctgagtctgctgttggcaactgagggacctcaggcacctatggcctccccctgtttgttggtatctgcttatgaaatgaggacccagaagtgccctccgagctcttttgttgacttccgtctcctacagatgctgctgtaatggaccaagagcctgcagggaacagaacagccaacagcgaggtaggtgctcctcggcccagcctcgtggctagtgttattcccaaacagtcctggaaaacgtgagcaccctccctcactcagcatttccctccctcactcagcatttccctctctccaggactctgatgaacaagaccctgaggaggtgacatacgcacagttggatcactgcgttttcacacagagaaaaatcactcgcccttctcagaggcccaagacaccccctacagataccatcttgtacacggaacttccaaatgctaagcccagatccaaagttgtctcctgcccatgagcaccacagtcaggccttgaggacgtcttctagggagacaacagccctgtctcaaaaccgagttgccagctcccatgtaccagcagctggaatctgaaggcgtgagtcttcatcttagggcatcgctcctcctcacgccacaaatctggtgcctctctcttgcttacaaatgtctaggtccccactgcctgctggaaagaaaacacactcctttgcttagcccacagttctccatttcacttgacccctgcccacctctccaacctaactggcttacttcctagtctacttgaggctgcaatcacactgaggaactcacaattccaaacatacaagaggctccctcttgacgtggcacttacccacgtgctgttccaccttccctcatgctgtttcacctttcttcggactattttccagccttctgtcagcagtgaaacttataaaattttttgtgatttcaatgtagctgtctcctcttcaaataaacatgtctgccctcattgcttcaggtaatgtgacactgtattcgctgaaagaaaccgctgttatcattaccatgtccacataaccccatctgttctccgctgggttctcacccctggactctgagcttctggaagcagggtggagcctcatttgtctctgggactccaatttccatccaaagatgcagcacataggaggttccaaggatcgtgaatcacatgaacaagtgatattcttactctctgcaacctggaaagctggcagagtcattccacgatgaaacatttgtagagtcataagccttgctagtctcatctccacggggacacatatcaacacatcatatttcatactataaatatacagtcgctcctccatatctgtggggtttacaggtgtttattgaaccaagtgtaaatcaaaaatattcagagaaaatgtccacaaagtttcaaaatgcaaaactatgttgaatggacacaaatgaggcagtgtgtaggctgtatcaggaattataagtaatcaagagatgatttcatgtatacaggaggatgtgcatgggttatatccaaatgctgtgtcattttatgtaagaggcttgagcatctgcagattttggtacctgagtggagatcctgaaaccaatcacccacgaatagtaaaggatgaccgtatatgacttttatttctcaattttaaatataaatcataaaaaatgtacaataactagataaaaagtaagaagtgtttttatagtgtgagaataagtttagatttattttttcctacgtgtaaccctttggtttaatattatttattaagaagacattctatgccaccttaaaccacacggcagcctttgtcaactctaaagggactgtgtgtacacggatgtattttagacactgtttctgctaaggggctctctgtgtccacactcttgaggatgctgcacttcatgtagccttataaaaccctttaaatttagtagccagagccctctaatttgttattataggctacttgctatttttttttcttgaggcggagtcttgctctgtcgcccaggcgggactgtagtggagcaatctcagctcactgcaacttccgcctcccaggttcaggcgattctcgtgcctcagtctcttgagtagctggcgtttcaggtgcctgccaccaggcatggctaatttttgaatttttagcagagacgcggtttcactgtgttggccaggctgctctcaatctcctcatctcagttgatccgcccacctcggcttcccgacctgctgggggaaacttgattttctatagcattatgttactggatatttctgtaaaatttaaaatgagggaggcagagagacagagagagagcaaactccagagttgggactctggaatcttgagtcatgagacaaattatagataaaactacaaaaatccagaatttacatgtgtggtttttgctgataaagtacaattctaagattgtaaataattgcataatccttccctgggaatttaaatcatttgaactggttctgctgtaatactagaaatacaagcatgaacaattctaatggtttattagtcacaatgactctgaaaacactaataatacctattagatattttgcatattacacaggaagaagagttcgaatctcagataaaaacaataaaaattcatgaaaagtctttcatgttagcacagattttaggcatctcatgtttgggaggttggatctaagacatgttttgagttggtcatagtgaaggacgcgaggtgtcaattctagtgagagcaatttccaggaagccatgttctgctcttgagcgagcacccactgggcctcatgcaaggtagaaaaagcctgcgtacgtcaccctcccatgatgtggtcaacatgtaaactgcatgggcagggcgccaaataacatcctgtgcgctgctgagctgagctggggcgcggccgcctgtctgcaccggcagcaccatgtcgctcatggtcatcatcatggcgtgtgttggtgagtcctggaagggaatagagggagggagcgtggggatggagatctgggcccagaggtggagatatgggcctggaggtggagttatgggcctggagtggagatctgggcctagagatggagtgatgagcctagaagtggagatctgcgcctggagtggagatctgggcctggagtgaagatctgggcctggagtggagatatgggcctggagtggggataggaacctggagtggagagaggaacctggaggagagataggaacctggaggggaggtaggagcctagggtggagatatgggactggagtggagatatgggactggagtggagatatgggcctggagtggagttatgggcctggagtgaagttatgggcctggaggtggagatacgggcctggagtggagatatgagcctggagtggagatatggtcctggagtggagatatgggcctggagtggagatatgggtctgcagtggagttatgggcctggagtgaagttatgggcctggaggtggagatatgggcctggagtggagatatgggactagagtggagataggggcctggaggtggagatctgggcctggagtggagatctgggcctggagtggagatctgggcctggagtggagatatgggcctggagtggagatatgggtctgcagtggagatatgggcctggaggtggagatatgggcctggagtggagttatgggcctggagtgaagttatgggcctggaggtggagatatgggcctggagtggagatatgggactagagtggagataggggcctggaggtggagatctgggcctggagtggagatatggccctggagtggagatatgggcctggagtggagatatgagcctggagtggagatatggccctggagtggagatatgggcctggaggtggagatatgggcctggagtggagttatgggcctggagtgaagttatgggcctggaggtggagatatgggcctggagtggagatatgggactagagtggagatacgggcctggaggtggagatctgggcctggagtggagatatggccctggagtggagatatgggcctggagtggagatatgagcctggagtggagatatggccctggagtggagatatgggcctggagtggagatatgagcctggagtggagatatggccctggagtggagatatgggcctggagtggagatatgggcctggagtggacatatgggtctggagtggagatacgggcctggaggtggagatatgggcctggagtggagatatgggcctggaggtggtgatatgggcctggagtgtagacatgggccgagtggagatatgggtctggagtggagatatgggcctggagtggagatatgggactggagtggagatataggcatggggtggagacatgggccgggagtggagatatgggactggagtggagatacgggcgtggggtggagatatgtgcctggaggtggagatatgggcgtgggttggagatatgggcctggagtggagatatgggcgtggggtggagatatggatctggagtggagacatgggcatggggtggagatatgggcctggtgtgtagatatgggcctggagtggagatatggccctggagtggagatatgggcctggagtggagatctgggcctacggtggagatatgggcctaggatggggatatgggcctggaatggagatatgggcctgggtgtggagatatgggactggagtggagatatgggcctgatgtggagatatgggcttggagtggagatatgatcctggagtgtagttatgggcctggaggtggagatctgggcctggggtggagatatgggcctggagtggagatatgggactggagaggagatatgggactggagtggagatatgggcctggagtggagatatgggcctggattggagatatgggccgagggtggagatctgagcctggattggagatgtgggcccggattggctatatgggtctagggtggaaatatcggcctggagtggagatatgggcctggagtggagatatgggcttggggtggggatatgggcctggaggctgggtctctgcacagccgagagcactgttcttgggtgcaggtaggctctgatggtgagtttcccttcggcccaggaaggggctggctatcaagactcacagcccagtgggggcagcaaggaaggccttgtttgcctgcaaatggatcttccatcatgatctttctttccagggttcttcttgctgcagggggcctggccacaggagggtaagtccttctccaaaccttagggtgtcatctccccacataagaggattttcctgaaacgggagggaagtcctgtcagggagtctctcataaactaggaagaggggaccctggggtgctcggcccacagttccgaccttgcctccctggcctctcaaccccttggcagagtcaagttgtgtggggaccagggttggactagggtgttcaaagctgggttgtgtggtggggaagtggtaggaacagcagatcctctgaggacaaaggtgttactcacacacttcagcgtttccatgacggtaggggctgcagtgtggctgctgtcattctaccagaagaggtgggaaaccacagccatggccctgacattccaaatcctctgatgggggctaagttttttattttcattcaggcaactgctgatattccattctcaaaggacatgccctccacttcatgtctaccctgtgttgttttatgtcagtaatcttacagtattaaaatctagtaggagtctcttactcagcacttgctcaaagttctcagctgacacttttgttgtacggagacaccttgtctttgtgggatgggtccttcctttagccctaggcaccaaggtgtgatagcagccatagaaatgtggaaagtggggagaatcttctgagcacagggagggaggcacagctccacatcctcctctctaaggcggcgcctccttcaccccaaggtggtcaggacaagcccttgctttctacctggcccagccttgtggtgcctccagaacatgtgactcttcagtgtcactctaatcttgggtttaacaacttcagtctgtacaaggatgatggggtgcctgtccctgagctgtacaacagaatattctggaaaagccttttcatgggccctgtgaccacgtcacatgcagggacctatacatgccggggttcacacacacactcccccagtgggtggtcggcacccagcaaccccctggtgatcgtggtcacaggtcagagggctcctgtctgggattctccttgtcccacctcctgaatcccagagcttctggtaggcatgtccttgagggtcccatcacgcaggccctaactgtatttggggtaaagggggattgaatacagggaaatgggtgctgtggtgggaagaataagtgtccccagtgatgactgcattctaatccctggagtctgtgactatttatgttataggggaagggactgaaggggaagatggagctcaggttgttgatgagttgaccttgagatggggagacagcctggactgtcccggtgggctcagtataatcacaagtgtccacatgaaaggaggaggaagaggagagtggggattagagcagcgtagtgggagactccatcagctttgaaggtggatgaaggccataagccatgaatgcaggtggcctatagaggctgggaaagtcaagtaactgattctcctgagtctccagagggaacacagccctgcagatgccttgattttagccctcgaaaaacagggtccgctttctgtctccagaatcggagggggtcagtgtgctctctcctgctgccatgcttctgataattttctacagcagcaacaggaaaccaacactggaacccaggtcaaggacaagttaagaaaagacacaaggatagccaggcatggtggcaggtgcatgtaatcctagcgactcgggaggctgagagcaggagaatcgcttgaacccaggagacagaggttgcagtgagcgtagaccacaccacttcactccagcctgggtgaaggagtgagactctgtctccaaaattaattaattaattaaagaaaccaaacaaagagaaggttggctacaccgagatcagcaagggtgggatgatgatgccaccaccaggctccatccacatagggaggggttgatactcctcaaatcagcacgaggagccagcctatggaaactggcaccatggagaaggcacagacatggcaagagtggctcccagtccccaccaggaacagggtgtgtggacactggtgcctgccttactgatcagttcatacctcctgccaaggattccaattcgtccaaaagagattgaaccaagctgctaagagccgggacgtgcagcctatcctgcttcctcttccactcccacatagacagtaagaaagacattagtgtgaaatagatacaacagcccaagagatgaggctgagcccagtgggaagggaatcacagctactagagacagagggacagagaagagggagggagacagatggaaggacctgcaccaggagttatgggcacagaaaagaacatgaagacacagagaggaagcagagagacagacaccagcgaagggaaggctcactcattccaggtgccatggatgggatgataaagagagacaccttctaaactcacaacctctcttcctaggagtccacagaaaaccttccttcctggccctcccaggtcacctggtgaaatcagaagagacagtcatcctgcaatgttggtcggatgtcatgtttgagcacttccttctgcacagagaggggaagtttaacaacactttgcacctcattggagagcaccatgatggggtttccaaggccaacttctccattggtcccatgatgcctgtccttgcaggaacctacagatgctacggttctgttcctcactccccctatcagttgtcagctcccagtgaccctctggacatggtgatcataggtgagagtgtccagacattcttctcattgtcattgggatgcagagtgaatgatccaggacttggagacccaggtggttgtaaggaagatgagcttggtattcttatggagagagactgacttggtgaggtctgtgccaacagagacagagaaacaagagacacaagtacagaccaggtgtcataacagaggacaaacacaggggccatacagggagttagaaaagacagaaagagttaaaggagacagacagacatgtcccagacagaggtgtccttccatgctgactttgctcagagacctggcacaggttagaagtttcatttctgttttacctccacaaagtgttctctaccaggagaacccaaggacacccatatttctgacctgagttgggccctgtggcctcaggccttgtggcacctacagatgccatgcttattctgacacctctgacttccatgcaatggagaataatcgtcccaaaatatcatggccccagaacaccaacccctgtatgctgtgtgaacttgtggtctccagactggattctgaggctcacattccaaataaccccacatatcacatatgagaggatcactgagaagcacagagagaaatcagggacaccaaaaagcaaagacataaacacacagagaaagagccagaggaaggagattgagagactcacagacacataaagagagagaagagggcagagaagtggagagaatgatggaagagagcagagaaaaccactaaaattagagtcctgagggcgaggcacaagggcatagaaagatggagatgtggggatgaattgcagagattccaaagagaactagagagaccgagaggcagagcaagacagatgatagatggatagatacagatagatgatggatagatatagatagatgatatataggtagatgatagataataggttatagatacatagatgatgattgattgattcattaatagatgatacatagagatgatgatgatgaagatagatggatagataatacatagagatagagaggaagacaaagagagaaataatagagagagagagatgatacatatatatagataatagatgattgacggatagacaattgatagataaatagatgatatatagatatagatgacaggtagagaatttgtagataggcaccgaatagataaatagatggattgatagataatagatagaaatatgcagaaagttatgaacgggacacaaactgagaaactcagagttaaaaaaagtaacatcaagtcaaccaatccaaggagagccagagagaataaaacaatccaaaaacggaaaacataactagaggtagggaagtgaggtcagagacctacagagacagagaaggtggaaggaggaaatagacatgaagagagatagggtggagggtgagacagagaaagagagcattaggccatagagcaggggagtgagttctcaggtcaggtgtgaggggagctgtgacaaggaagatcccccctgaggaaactgccccttctccttccaggtctatatgagaaaccttctctctcagcccagccgggccccacggttcaggcaggagagaatgtgaccttgtcctgcagctccatctatccagggaaggggaggcccatgaacgtaggctccctgcagtgcgcagcatcaacggaacattccaggccgactttcctctgggccctgccacccacggagggacctacagatgcttcggctctttccgtgacgctccctacgagtggtcaaactcgagtgatccactgcttgtttccgtcacaggtgaggaaaccccatatctgtcccatgtcctatgatcctagagccttagctgaggagcttcctgctgatgatggagagaagcatggacagatgcagagagaagacgcagcatgcctgtgagggagggatcagggcgcaggatggcacacacagcacctccaaaccctcctgcatggcctgcatggaggcctccgattagggctccagaaacccaggcagatgtagaaagcggtcaggagagacccagagaaggggagactgggctcagtttggggagatcagaggttccctcagcccctcaaccttacccatttcccagaagcccttcctggcctctcacccacacagagatgtcatcaccagcaacccctacatccttttctttttgtttgaaaaaatattcattgaggttaaatatacctatatagcttaccacttttaacatttttttttttttgaggtggagtctagctctgtctcctatgctggaatgcagtggcacaatctcagctcactgtaacctccgcctcctgggttcaagcgattctcctgcctcagccacctgagtagctggtactacaggcgcccatcaccacgccgggctactttttgtatttttagtagagagggggtttcaccatgttggtcgagctgctctggaactcctgaccacgtgatccacccgcctcaggctcccaaagtgctgggattacaggcatgagccaccgcgcccggccacgtttaccaattttaagtgtaaggtctagtggtcataaatacatacatataaattttttgtttgtttgttttatcctccacccttttcttcctggcctctggtagccaccattctactctctatcttcatgagatccaccttttagctcctgtatatgggtgagaaatgagaatatttgtaatgacttccagttccatccatgtggctgcaaatatcaggatgttattctttctatggatgagtagtctccgctgtgcgtatgtactacattctctctatccattcatccactgatgggcaggtaggttgactccacatcttggctactgtgaagagtgctgcaccaatcatacgagtgcagatatcacttcgatacattgatttactttcctttggatataaacccagtagtgaaattgctggatactatgaaagttctctttttagtttttcgtttgttgttttgtttttgtttttgagacagtttccctctgtgcccaggctggagtacaagtgatgtgatcttggctcattgcaacctccgcctcctgggttcaaatgattttcctgcctcagcctccctagtagctgggattacaggtgcacgccaccatgccgggatactttttggttttttttagtgtacatggggtttccccaggttggctaggctgctctcaaactcatgacctcaactgaggtgcccgcctcggtctcccaaagtgccgggattacaggcatgatccacttcatccaacctctttttagttctttaaaggacttccatacttttctccgtaatggctgtactaatttacactcctaccaacagggtaccagggttctcctttctctaccaccttgccagcatttgttttgcctgtcttgcagctaaaagccattttattttatttcattttattttgagatggagtttcgctcttgtcacccaggctggagtgcagtggtgcgatctcggctcaccgcaacctccacctcccaggttcaagcgattctcctgcctcagcctcccgagtagctggaattacaggcacacgccaccacgcccgactaatttttgtatttttagtagagacagcgtttctccatgtgggtcagactggtctcaaactcccgaccttatgagattcgcccacctcgggctctcagagttctaggatgacagacgtgagccacctcgcccggcctaaaagccattttaatggggtgagatgaaaactcactttgattttaattcgcgtttctctgatgatgagtgatactgagcactttttcgtatgtggggaaatttcatgtcttttgctcctttttcaattaaatcatttgttttattgagttgtttgagcttcttatacttctagttattaatcccgtctcagatgcatagtttgcacatatttgctcccaatctgtgggttgtctcttcactttgttggtttatttttagcggtgcagaagttgcttagtttgaggtaatcccaatggtctatttttgcttcgattacttgtgttttgaaggtttaaaacaaaatgtcttccttcagacaaatgtactggagcatttccccaatattttcttctacgtgtttcacaggttcaggccttagactcacatctttaatccactttcatttgatttttgtgtatggtgacaggtagaggtgcagtttcattcctctgcatgtagatgtccaggtttccctgcactgtttattgaaaaaactgtcctttcctgattgtgagttcttggcacctttgtcaaagtccattggatgggctgggcatggtggctaacaccagcaacttcagcactttgggaggccaaggctggtggatcacctgaggacaggagtacaagattactctggccgacgtgatgaaacctcgtctccactaaaaatataaaaattagctgagcatggtggtcagcacctgtaatactactactcaggagtttgaggcaagagaattgattgaacccaggaggctgaggttgcagtgaaccgagattgcacctctgcactccagcctgggtgacagagcgagactccatctcaaaagaaaaaataaaaaaaattggatgtaaatgcatggattatatctgtgttcttcattctgctccgttgttctatgtgcctttcttcatgccaacatcatgctgttttgcttactacagctctgtaacatattttgagatcaggtagtgtgatgctcctgttttctctttataccttgaagtctcaagacagtgggcgtcacatacaaaaattatggaagaaaggatccctggactcccagggcccaatgttagataacagagtgttggccatgaaccaaactcaaagatttccactgagtagaggacagacaccctcatttcctcacctctctcctgtctcatgttctaggaaacccttcaaatagttggccttcacccactgaaccaagctccaaaaccggtgagtacaggaccctcttatatccgcttttggaaccctggggaggtggaaaccttggattcaggcgttgactcagcatctcacagctctgacattgtacgcctgtcttctaccatctccgaactccagatactccaacagcgaaagggatctgggcccaacacagggctcagtgaaatctcttcatctctcattttatggagctgagacctcctacaagctagaagaatgattgccaatctgacatccttctcaggaaaaacgcaatgtttgttctgcttgcattcctaactggaggataaattcctgggggcttgagagagggaagggaagcgaacatctgatgagggcgaggtgttttagagaagttccacttgccaaggaatgagctcctgttggtcatgaaacaaccctggctgactcagcagagcaagagccttgccgtaacagagaacagagctcatgcacgcacactttgactcactgacttattcagccacggccccatgctcaggttgtgcagtgtggaagcttttcctattgttgccataacaaatttccacaagattcgtgggtgaaaacaaaacggttatttaattatcttacagtgctctagctcaaagcatgaagtgcatctcactgggctaaaatcaagatgacagcaagcctgccttccctctgaggattccaggcaagaatctgcttctcacttgtcccatcttataaaggctcccagttccttggctgctggtccctttcctccttcctcaaaacccacaaagactggtcacatctcacatggcatcactcagacccttcttccttaccacacctctttctctgaatgctgctctcccttcttcctcatcttttgaaaacttggggattctattgggttcaccaagatgaaaatccgtcataatctcccggaaatcattcaggatacccttgttttaagttcagctgattagcaaccataattccatctgcaatcttcattcctcctttccatgtaaaataacatattcacaagctatggaggctaggacagggacattttggggtgggacagcattctcctgccttccacaaatggtgaacaagatgcatttggcctctgctcttgggacactgatattgcagatggttaaatgggaggacagaaaatgaatgcacaagtggaccaataaatgaatgatccattgggaagcatctgtgcatgaaatctatttgtttgttcgttcgtttgtttattgagacagagtctccctctgtcttccaggctacagtgcagtgtcacgatcttggctcactgcaacctgcgtctcctggatccaagtgattctcctgcctcaccctctcgagtagctgggattacaggcaactgccaccatgcccggctaattctttttgtatattttttgtagagaggatgtttcaccatgttggccaagcttgtctgaaactcccaacctcaagtgatccgaccatctcagcaacccaaagtactgggattacaggcgtgagccactttgcccagccagaattcaaaataaataatagataatgctgagtgtataattttgggtgacagagaaggtctcactaatcagatatttgtgacattaatgaaaaacacggattgaacccctgaaagattggcggaaggattttccacacacagctgtcagctgtgaaggcacaaaggtgaaaacaatctgatgttgaaggaagaggctctgcctgaaatgctgggaatgaggtggggagaatgacaagatgactgtagagagatggagagcactctgggtacacaggaaactaaggaggaacaaggagtgtgtgtttgacactcacagccattggattcacctcggggtaaccaggaatccctacatgattaatagtgactgacaagaaaataagggaggcccaggtgcgtaactggaatctaggagactgtggaaaaggcaattgccgccccactggtgaaatgtggtgctgatttagacactaaatgaatgaagtagatggatataagatatgcttgtgaggtagaatcattggctggaaaggcttgctgggtttgattttcctacttgtttaatcctcgcttaattaatttctttctgagatttattcatcctacacataaatcaatacctggcaaaggagtgacagatatatgaggggtggtggaaatgaagggacctattatagcataatatacaagtctgtgaacggtggctcatgcttgtaacccagccctgcaggaggccaaggcgggtggattccatgaagtcaggagttccagaccagcctggccaacatggtgaaaccctatctgtactaaaaatacaaaaattagccgagcatggtggtgcatccctgtaatcccagctcctactctggaggatgaagcaggagaatgacttcaacccaggaggtggaggttgcagtgagtggagattgcatcactgcactccagcctgggtgacacaaggagactccgtctcaaaaaataaaaataagaaatgcataaatataataaaacacacacgaatgacaaaggcacctgaattccaatcatcatttttctatttctctataattacttctttgatcctttatcttatccattaggcaatgagcctaaaacctcttccctatttggctttctgtgagcatgagatcacatagaaaatgtgaaagcccgctgaatcctccagcacggatcctggaatagagaaagtgctctggtcatcgcaaaaaaaaacttgcccactcacccaaatcccccacctcacccctacttccaatcacctgtggagattcagatagaccatggggaggaaacattaatactccttggagtgagtccagatcttggaatcagagatcagcgacagcactagctcctgttcccctttcctactaattcacaggaggacaggtggtattgaagcaatagatggtcgagggggtggtccttcccccagcctctcgggtagaacagcagcctaacatgtgtctcccgagatcacaaagagtagcacatttcacacgggcttcaacactatttcctggctgtttgacataagagaatcttgcttcgctatttttaatcgtgatttcacctttgtttcctttccttggtgaatgcaatttgtttgactcaagaatgctgtggatgtagaaatcctaaagcacattcgctgtgtatcaatcccagtgcagtcttcccagagaagactctaaacaaatcctggactgcacctgggcctatgccaattcctatcactcaccgtcactccagggagacagaacacacagagaatacgttacataggcaggttcattactaacagataagcagcgagtgacaacagaagcctgcatttcaatgtgagccagtccctcaaggctcagaaaagctgctcgggacatatggagtcaccccatttgcagtgtagctgcgggaagccagaaagcagcccagcctgggttttgtaccctggagccacaggaagcactcagctaaagcactgcatgacgtcctcctccaggaagaacaggaagacagcccaggctgttctgagacattcctcctgatctcaggatgttgctatcttagtccatttttgttgctctaaaggaacacttgagcctgggtaacttctaaagaaaagagattggtttgcctcacagttctgcaggctgtactggaagcatggcaccagaatctatttctcgtgacggcctcaggctgctcccactctggcagaagggaaggagggtctgtctgtgcagagaccgcagagatcacacggcaagagagagagtaagggggagagggagcgatggagcttccaagctctttttaacaaccagctctccaggaactaacagagggggaacttgctaaccccgtctccttgggacagcattgatctgttcatgatggatccacctccatgacccaaacacctctgaagaggcccaacctcccacaatgggggtgaaatttcaatgtgaggtttgaaagggtcaaacatctcaactaaagtagttgtatcctcagcacgttctatggttactatgagagctataattgagaaagcaggggaaagctaggtctcccgccatttgggtgcttgtcctaaagagacgttgtatgtggttacctgccaatcaagaaatgcgagacaattcataaagaggaactgctatgattagcttcttattggtgtctcctcttcttccaggtaaccccagacacctacatgttctgattgggacctcagtggtcaaaatccctttcaccatcctcctcttctttctccttcatcgctggtgctccgacaaaaaaagtaagtctcacgaagcagaggccagagagctcagggccatgtggggaagcaggatgggagcacgcggatgtgtgttcctcaccagcaggatggtccctggcccaagacaggagccacagaggcaggactttctagagagagcaccagattcccttcccctgccttcagctcacagaccattgcctgattctgaactgtatcctcacgtcccctgcagccactcacatccaggagaaggttccatgacaggcagaaagtgggagatagaatcaatgggatgggacctcagagctattcatgggatgggtccttgaactcagagagatagaatgtctgagtctgctgttggcaactgagggacctcaggcacctatggcctccccctgtttgttggtatctgcttatgaaatgaggacccagaagtgccctccgagctcttttgttgacttccgtcttctacagatgctgctgtaatggaccaagagcctgcagggaacagaacagtgaacagcgaggtaggtgctcctccgcccagcctcgtggctagtcttattcccaaagagtcctgaaaaatgtgagcaccctccctcactcagcatttccctctctccaggattctgatgaacaagaccatcaggaggtgtcatacgcataattggatcactgtgttttcacacagagaaaaatcactcgcccttctgagaggcccaagacacccccaacagataccagcatgtacatagaacttccaaatgctgagcccagatccaaagttgtcttctgtccacgagcaccacagtcaggccttgaggggatcttctagggagacaacagccctgtctcaaaaccgggttgccagctcccatgtaccagcagctggaatctgaaggcatcagtcttcatcttagggcatcgctcttcctcacaccacgaatctgaacatgcctctctcttgcttacaaatgtctaaggtccccactgcctgctggagagaaaacacactcctttgcttagcccacaattctccatttcacttgacccctgcccacctctccaacctaactggcttacttcctagtctacctgaggctgcaatcacactgaggaactcacaattccaaacatacaagaggctgcctcttaacacagcacttagacacgtgctgttccacctcccttcagactatctttcagccttctgccagcagtaaaacttataaattttttaaataatttcaatgtagttttcccgccttcaaataaacatgtctgccctcatggtttcggtaacgagactcttttcttgcctaaggcttccggtgttatcattaccatgtccacataaccccatctgttctccattgggttctcagccctggactctgagcttctggaagcagaatggagcctgatttgtctctgagactccaatttccatccaaagatacagcacataggaggctccaaggatcgtgaatcacatgaacaagtgatattcttactctctgcagacctggaaagctggcagagtcattccacgatgaaacatttgtagagtcataggccttgttagtctcatctccacggggacacatatcaacatatcatctttcataatataaatatacagtcggtcctccatatctgtggggtttacaggtgtttattgaaccaacaataaatcaaaaatattttcagaaaaaaatccccgaagtttcaagaagcaaaaaactatgttgaatcgacacaaattgagtggcgtgtaggctgtgtcaggaattataagtaatcaagggatgatttcatgtatacaggaggatgtgcatgggttctatgcaattgctatgctattttttttttttttttgagacagtctcactctctcacccaggctggagtgcagtggcatgatctcagctcactgcaacctccgcctcccaggttcaagcgattgtcttccctcagcctccccagtagcctcccctaggattacaggcacgtgccaccatgcacagataaatttttttgtgtgtgtatttttagtagagacggggtttcagaa[136 bp omitted]gattttggtatctgaatggggatcctggaaccaatcacccaggaatagtgaaggaccacagtatataatttttatttgtcaatcttaaaaataaagcataaaaagtttacaacaacaagataaaaaataagaagtgtctttatagtgtgaggataagtttagatttattttttcctacgtgtaaccctatggtcctgtgttatttgttgagaaaatattctattccaccttaaactacatggcagcctttgtcaactataaagggactgtgtatccacagatgtattttagacacagttttctgcccagtggttctctgtatcccctctcatgaggatgctgcatttcatataaacttatagaaccccttaaaatttggtaacctgagttctctgatttgttattataggttatttagtttgcttttttttttctttcttgagacagactcttcctctgtcacccaagctggagttcagtggcttgagctcagctcactgcagcctccgcctcccaggttcaagcaattctcgtgcctcaggtttagtactagaaactcatcaggaaaattagaatggctttttgtcacaattactctgataatgttaataatacctcttagatattttgcacattacacatgaagaaaagtttgaatctcagataaaaacaaaaatacatcaaaagtctttaatgtaagcacagaattcaatcacctcatgtgtgagaggttggatctgagacgtcttttgagtctggtcatagtgaaggatgcaaggtggcaattgtagtcacaacaatttccaggaagccatgttccgctcttgagcgagcacccactgggcctcatgcaaggtagaaagagcctgcgtacgtcaccctcccatgatgtggtcaacatgtaaactgcatgggcagggcgccaaataacatcctgtgcgctgctgagctgagctggggcgcggcctcctgtctgcaccggcagcaccatgtcgctcacggtcgtcagcatggcgtgcgttggtgagtcctggaagggaatagagggagggagagtggggatggagatctcggcctagaggtaaagatatgggcctggagtggagatatgggcctggagtggagatatgggcctgggtgtggagatatgggcctggaggtgtaaatatgggcctggagtggagatatgggcctggaggggagatatgggcctgggtgtggagatatgggcctggagtggagatacgggcctggagtggagatatgggcctggagtggagatatgggcctgcaggtggagatctgggcctggagtggagatatgggcctggagtggagatatgggtctgatgtggagatatgggcctggagtggagatatgggcctggagtggagatatgggcctagaggggagatctgggcctggagtggagatatgggtctgatgtggagatatgggcctggagtggagatatgggcctggagtggagataggggcctggagtggagatatgggcctggagtggagatctgggccaggaagtgttgatctgggcctggagcctgggtctctccacagctgagagccctgttcttggcagcaggtagcagggaggctaagtttaccttcagcccagcaagggcctggctgccaagacacacagtgcagtgggggcagcagggtgccctggtttgcctgcagttggatcgtctatcatgatctttctttccagggttcttcttgctgcagggggcctggccactcatgggtgagtccgtccccaaaccttagggtgtcatctccccacataagaggatttttctgaaacaggagggaagtcctgtcggggagtctctcataaactaggaagaggggacccttggatactcggcccacatttctgacctcgccctccctggcctttctttccctttcctgagtcaagctctgtgaagactggggtgagactggggtgctccaagctggggtgtgcagggaggaagtggtgtcagcagcagagaaagagagggaagcagtgctaggaacagcaggtcctctgaggacaaaggtataactgacaccctccagcgtttccgtgacggtaggggctgcagtgtggctgcggtctttctaccagaagaggggggaaaccacagccatggccctgacattccaaatcctctgagggggctcagttcatgaattggctgatattccattcacataggacatgccctccatgccgtgtctactttgtgttgttttatgtgagtaattttgcagtattaaaatctagtaagagtcacttattcagcacttgctcaaagttctcagctgacacttgttgtagggagacgccatgtctatgtggggtgggtccttcctgtagccctgggcacccaggtgtggtaggagccttagaaagcggaaatgggagaatcttctgagcacagggagggaggggtggctccacatcctcctctctaaggcagtgcctccttctcccccaggtggtcaggacaaacccttcctgtctgcccggcccagcactgtggtgcctcgaggaggacacgtggctcttcagtgtcactatcgtcgtgggtttaacaatttcatgctgtacaaagaagacagaagccacgttcccatcttccacggcagaatattccaggagagcttcatcatgggccctgtgaccccagcacatgcagggacctacagatgtcggggttcacgcccacactccctcactgggtggtcggcacccagcaaccccctggtgatcatggtcacaggtcagaggctttctgtctgggcttctcactgtcccacctcctgaatcccagagcttctggtgggggtgtccatcagggtcccatcacccaggccccaactgtatttggggtcaagggagattgaatacaggggaaatgggtgctgtggtgggaagaataactgtcgccaatgatggctacattgtaaaccctggagcctgtgactatttatgttatagggcaggggactgaaggggaaggtggagctcaggttgttgatgagttgaccttgagatggggagacagcctggactgtcctgctgggctcagtgtaatcacaagggtccgcgtgagaggtggaggaagaggggagtggggattagagcagtgtagtgggagggagacgctatcagccactgtgggctttgaaggtggaggaaggccactagtcacagaatgcaggtggcctctaagggctggagaagtcaagagaactgatttgctgagtctccagagggaacgcagccctgcagatgccttgatttcagcacagggagaactggatccaatttctgtccccagaagtggaaggggtcagtgtgttctctcctgctgccatgtttgtgataattttctgcagcagcaacaggaaaccgacacaggaacccaggtcaaggacaagctaggaaaccaaacaaggatagccaggtgtggtggtgggcacgagtaatccaacgactggggaggctgaggcaagataatcacttgaaccggggaggcagaggttgcagtgagccaagacaacaccactgcactccagcctgggtgaaaaagtgactgtctcaaaaataaattaattaatcaattaattaaagaaaccaaacaaggagaaggttggctaccgtgggatcagcaagggtgggatgctgatgccaccaccaggctccatccacataggaaggggttgatgctcctggaaccagcaccagggaccaccctatggaagctggggccatggagaaggcacagacatggcaggagaggctcccaatccccatcaggaacagggtgtgtggacactgatgtctgccttactgatgagttgatacctctgccagagactccaatttgttcaaaagagattgattcaggctgctgagagcctggacatgcagcctgtcctcttccacccccacatagacagcaggaaagagactagtgggaaagagatacaacagcccaagagatgaggctctcttcacagtgggaagggagtcaggggctactggagacagagggacagagaagagggaggaagacaaatggagggacctgcaccaggggatatgggcacagaaaagacacggagacacagagagggaggagagagacagacctctgggaggggaaccctcactcattccaggtgccatggatgggatgataaagagagatgccttctaaactcacaacttctctttctaggaaaccacagaaaaccttccctcctggcccacccagggcccctgctgaaatcaggagagacagtcatcctgcaatgttggtcagatgtcatgtttgagcacttctttctgcacagagaggggatctctgaggacccctcacgcctcgttggacagatccatgatggggtctccaaggccaacttctccatcggtcccttgatgcctgtccttgcaggaacctacagatgttatggttctgttcctcactccccctatcagttgtcagctcccagtgaccccctggacatcgtgatcacaggtgagagtgtccagacattcttctcattgtcattgggacacagagtgaatgatccaggacttggaacccccaggtggtcatgaggaagataagcgtgggattcttatggagagagactgactcggtgaggtctgtaccaacagagacagggaaacaggagacataagtacagaccaggtgtcataacagaggacagacacaggggccatacggggaagtagaaaagagagaaagaggtaaaggagacactcagacagacagacatgtgccagagagaagtgtccttccatgctgactttgctcagagacctggcacaggttagaagtttcatttctgttttgtctccacaaagtgcttctacgaggagaacccaaggacacccatatttctgacctgagttgggccctgtggcctcaggccttgtggcatctacagatgccatgtttattctgacacctctgccttccatgcagtggagccataattatcccaggatatcatggccccagaacaccaacccctaaatactgtgtgtacttggtgtccccagactagattctgaggctcatattccaaataatcctacatataataggatcactgagagacacagagataaatcagggacttcaaaaagcaaaggcataaacacacagagaatgagccagaggaaggggattgagagactcacagacacacaaaaagaaagaaaagagggcagaggagtggagagaatgctggaagggaggagagaaaagccccaaaatcagaaccctgagggaggggcacaaagacagagaaagataaagatgtggggatggattgcagagattccaaatagaactagagagactgagaggcagagaaagacaaggagatggagagagacagatgatagatggatagatagatatagatagatgataaataggtagatgatagataatggataggttatagatacatagatgatgattgatagatgatacatagagatgatgatgatgatgatgaagatagatagaagacacatatataaatatatagatacatagatgatacatagagactgacaggcagacagagaggtaatagagagagagagagatgatacatagatacagataatacatagatgattgatggatagacagatagacaattgatagataaatgatacatagatatagatgacagataatttgtagatagacacaaaatagatagatagataatagatagaaatatgcagaaagttatgaacaagacagaaagtgagagactcagaattatagaaaaaggaagatcaagtcaaccaatccaaggagagtcagagagaataaaacaatccaaaaagggaaagcatacccaggggtggggaagtgaggtcagagacctagagagacagagaaggcggaaggaggaaatagacatgaagagagttggggtggagggtgagagagagagagagcattaggtcatagagcaggggagtgagttctcagctcaggtatgaggggagctgtgacaaggaagaacctccctgaggaaactgcctcttctccttccaggtctatatgagaaaccttctctctcagcccagccgggccccacggttcaggcaggagagaacgtgaccttgtcctgtagctcctggagctcctatgacatctaccatctgtccagggaaggggaggcccatgaacgtaggctccgtgcagtgcccaaggtcaacagaacattccaggcagactttcctctgggccctgccacccacggagggacctacagatgcttcggctctttccgtgccctgccctgcgtgtggtcaaactcaagtgacccactgcttgtttctgtcacaggtgaggaaaacccgtgtctgtcccatgtcttatgatcctagagccatagctgaggagcttcctgccgatgatggggagaagcatggacagatgcagagagaacacgaagactgggtgtgaggggggggtcagggtgcaggatggcagacagggcacctccaaaccctcttgcatggcctgcatggaggcccatggtcagggctccaggcacccaggcagatggagaaagcggtcaggacagacccagagaaggggagactgggctcagtttggggagatcagaggttccctcagcccctcaaccttacccatttcccagaagcccatcctggcctctcacccacacagagagatgtcatcaccagcaacccctacactcttttcttttcattttcaaaaatatttattgaggttaaatgtaactatataatttaccaactttaccatttttaaaagtaaaatctagtggtcataaatacctttatatgctgggtgtggtggttcacggttgtaatcttggcgctttgagaggccaagaaaggtggatcatttaagatcagggactcgagatcagcctggccaacatgcgggaaattcatctttactaaacagacaagaaaaattagccaagcatgccggcatgcacctgtagtcctagctacttgggaggctgaggcaggagaagcacttaaagccaggaggcagaggttgcactgagccgagatcatgccactgcactgcagcctgggagacagagagagactctgtttctaaataaataaatacatctatattcttttttttgttaccttccacccttcccttcctggcctctggtatccaccattctattctctaccttcatgagatccaccttttatctcctgcatgtggtgagaaatgggaatctttgtaatgacctccagttccatccatgtggctgcaaatgacaggatgttattgtttctatggatgagtagtctccaccgtgtgtgtgtactacagttctctatccattcacccactgataggcaggtaggttgactccacatcttggctactgtgaacagtgctggaacagtcatatgagtgcagatatcacttcgatacactgatgtcctttcctttggatataaacccagtagtgaaattgctggacactatgaaagttctctttttttttttttcttttttgagaaagagtttccctccttagtccaagctggagtcaaagtggtgcgatcttggctcattgcaacctctgcttcctaggttcaaacgattctcctgactcagcctccctaatagctgtgattacaggtgcacgccaccatgcctgactaattcttgtattttttagcacagacgggatatcccaattttgggcaggctgctctcaaactcctgacctcaagtgaggtgcctgcctcggtttcccaaagtgctgaagttacaggcataagccactatgcccagcctccttttagttttttaaagattttccatacttttctccataatagttgtactaatttacattcctaccaacagggtaccagggttctcctttctctaccatcttgccagcatttgttttgcctgtcttgcagataaaagccattttactttactttatttatttatttatttatgttgagatggagtttcactcatagtcgcccaggctggagtgcaagggtgtgatctcggctcactgcaacctctgcctcccgcgttcaactgattctcctgcctcagcctccaaagtagctgggattacaggcatgtgccaccacgcctagctaatttttgtatgtttagtagagagggagtttctccatgttggtcaggctggtctcccgacctcaggtgatccgcccacctccgcctcccaaagtgctggaattacaggcgtgagccaccggcctaaaaggcattttaatgggatgagatgaaaactcatcgcgattgtaatttacatttctgtgatgatgagtgatgctgagcactttttcatatacgtgatcgccatttctatgttttgtttgtggagaaatgtctcctcatgtcttttgctcgttttttaattaaattgttttattgagttgtttgagcttcttatatttccagttattaatcccatctcagatgaatagtttgcaaatatttgctcctattttgtgggttgtctcttcactttgttggtttatctttggtggtgcagaagttgcttggtttgatgtaatcctaatggtctattttttgctttgattacttgtgttttgaaggttttaaacaaaatgtctttcatcagacaaatgtcttccccattattttcttctacatgtttcataggttcaggccttagactcatgtttttaatccattttcatttgatttttgtgtaaggtgacaggtatagatgcagttttattcctctgcatgtagatatccagttttccccacaccatttattgaagactgtcctttcctgattgtaagttctcggcacct[134 bp omitted]tctactaaaaatacaaaaattagctgagcatggtgatcagtgcctgtaataccactactcaggagtttgaagcaagagaatttcttgaatccaggaagtggaggttgcattgagctgagattgcacctctacactccagcctgcatgacagagcaagattctatcacacacacacaaaagaaagccattggatgtaaatgcatggattatatctgtgttctccattctgttccattttttatgtgcctttctttatgccaatgtcatgctgttttgcttactacagctctgtaacatatttctaagtcaggtagtgtgatgctcctgttttctctttataccttcaagtctcaagacagtgggcatcgcacacaaaaattatggagaaaaggatcccaagactcccagggtccaacattagataacagagtgttggccatgaaccaacctcaaagatttccattgagtagaggacaagcaccctcatttcctcacatctctcctgtcccgtgttctaggaaacccttcaagtagttggccttcacccacagaaccaagctccaaatctggtgagtaaaggacccctcttatctctgcttttggaaacctggggaggtggaagccttggatgcaagtgttggctcaaacctcccagctctgtgaatgagggcctgtcttccaccatctctgaactccagacactccaacagtgaaagggatctagggccaccaaagggctcagcgaagtctctttacctttaatttcctgcaggtgagacctcctacaagctagaagaataattgccaatctgacatccttctcaggaaaaatgcagtgttttttctgcctgcattcctaactggaggataaattcccgggggcttgagagagggaagggaagggaacatctgatgagggtgggtgttttagagaagttccacttgccaaggaatgaattactgttggtcatcaggcaaccctggctgactcagcagagcaagagccttgccgtaacagagaacagagctcatgcacgcacacttcgactcagtgactcattcagccacagccccatgctcaggctgtgcagtgtggaagcttttcctattgttgccataacaaatttccacaagattcgtgtgtgaaaacaaaacggttatttaattatcttacagtgctgtagctcaaagcatgacgtgcatgtcactgggctaaaatcaaggtgacagcaaggctgccttccctctgagggttccaggcaagaatctgcttctcacttttctcagcttctagaggctcccatgttccttggctcctggtacccttcctccttcctcaaagcccacaaagactggtcacatctcacatggcatcactcagacccttcttccttaccacacctctttctctgaatgctgctctcccttcttgcccttcttttgaaaacttggggattctattgggttcaccaagatgaaaatccatcataatctcccggaaatcatccaggataccctccttttaagttcagctgactagcaaccataattccatctgcaatcttcattcctcctttcatgtaaaataacatattcacaagctatggaggctaggacatggacatttttggggtgggacaacattctcctgccttccacaaacagtgaacaagatgcatttggcctctgttcttgggacactgatcttgcagatggttaaatgggagggcagaaaatgtaggcacaaggggaccaataaatgaatgatctattgagaagcatctgtgcatgaaatctatttatttatgtatttacctacttgtttattgagacggagccttgctctgtcgtccaggctagagtgcggtggcatgatctcggctcactgcaacctccacctcctgggctgaactgatctcctccctcagcctctccagtagctgggattacagaccacaaccaccacgcccggctaactctttttgcatattttctgtagagaggatgtttcaccatgttggccaggctggtctcaaattcccaacctcaggtgatccaatagcctctgcctcccaacacgctgggataagaggcatgagccacggggccaagccaaattttcaaatcaataatagataatgctgagtgtattatttcaggtgacagagaagttctcactaatcagatatttgtgacattaatgaaaaacacggattgaacccctgaaagattggcggaaggattttgcacacacagctgtcagccgtgaaggcacaaaggtgaaaacaatctgatgtggaaggaagaggctctgactcaaatgctgggaatgaggtggggagaatgacaagatgactgtagagagacggagagcacactgggtacacaggaaactaaggagcaacaaggagcgtgtgtttgacactcacagccattggattcacctcgaggtaaccaggaatccctacatgattaatatgactgacatgaaaataagggaggctcagttgcataactggaatctaggagaccgtggaaaaggcaattgccgccccactggtgaaatgtggtgctgatttagacactaaatgaatgaagtagatggatataagatatgtttgtgaggtagaatcattggctggaaaggcttgctgggtttaatttttcctggtagtttaatcctcgcttcactaacttatttctgagatttatttctcctgcatctaaatcaatacctggcagaggagggagagctagatgaggggtggtgcaaatgaagggacctagtatagcataatatacaaggctgtgaacggtggctcacgcctgtaacccagcacttcaggaggccaacgcgggtggatcacatgaagtcaggagttcgagaccagcctggccaacatggagaaaccctatctctactaaaaatacaaaaattaaacaggcatgatggtggtgcatgactgtaatcccagctactctggaggaggaagcaggagaatgacttcagccctggaggcagaggttgcagtgagtggagatcgcatcactgcacaccagcctgggctacacagggatactctgtctcaaaaaataaaaataaaaaatacataaatataataatatacacaaatgatgcaggcacctgaattccaatcatcatttttctattcctctataattacttctttgatcctttatcttatccattagaaaatcagcctaaaacctcttccatatttggctttctgtgaacatgagatcatatggaaaatatgaaagccccctgaacccaccagcacaggccctgaaatagggaaagtgctctgttcatcacaagaaactttccccctcacccaaatcccccacctcacccctacttccaatcacctgtggagatacagatagatcatggggaggtaaacgctaatactccttggagtgagttcagatcttggaatcagagatcagcaccagcactagctcctgctcccctttcctactaattcacaggaggacaggtggttttgaagcaatagatggtggagggggtggtctttcccccagcctctcaggtggaacagcagcctaacatgtgtctcgcgagatcacaaagagtagcacgtttcacatgggcttcatcattatttcctggctgtttgacataagagaattctactttgcttttttgatcttgatttcacttttgtgtccttttcttggagaatgtaatttgagtcaagagggttgtggatgtagaaactgtaaagcacattcactgtgtatcaatcccagtccagtctttccagagaagactctaaacacctgctgtactgcacctgggcctatgccaatttctatcactcaccgtcactccagggagacagaacacacagagaatacgttacataggcaggttcattactaacagataagcagcgagtgacaacagaagcctacatttcaacgtgagccagtccctcaaggctcagaaaagctgctcgggacatatggagtcacctcatttgcagtgtatctgggggaagccagaaaatagcccagcctgggttttgtaccctgaagccacaggaagcactcagctaaagcactgcatgacgtcctcctccaggaagaacaggaagacagcacaggctgttctgagacgttcctcctgatctcaggacgttgctgtcttagtccatttttgttgctataaaagaacacttgagcctgggttacttcttttttttttttttttttttttgtatagtgcttctgatgagcttttttttaaaatttttattattattatactttaagttttagggtacatgtgcacaatgtgcaggttagttacatatgtatacatgtgccatgctggtgtgctgcacccatcaactcgtcatttagcattaggtatatctcctaatgctatccctcccccctccccccaccccacaacagtccccagagtgtgatgttccccttcctgtgtccatgtgttctcattgttcaattcccacctataagtgagaacatgcggtgtttggatttttgtccttgtgatagtctactgagaatgatgatttccaatttcatccatgtccctgcaaaggacatgaactcatcattttttatggctgcatagtattccatggtgtatatgtgccacattttcttcatccagtctatcattgttggacatttgggttggttccaagtctttgctattgtgaatagtgccacaataaacatacgtgtccatgtgtctttatagcagcatgatttatagtcctttgggtttatacccagtaatgggatggctgggtcaaatggtatttcaagctctagatccctgaggaatcgccacactgacttccacaatggttgaactagtttacagtcccaccaacagtgtaaaagtgttcctatttctccacatcctctccagcacctgttgtttcccgactttttaatgatcgccattctaactggtgtgagatggtatctcattgtggttttgatttgcatttctctgatggccagtcatggtgagcattttttcatgtgttttttggctgcataaatgtcttcttttgagaagtgtctgttcatgtcctttgcccactttttgataggattgtttgtttttttcttgtaaatttgtttgagttcattgtagattctggatattagccctttgtcagatgagtaggttgcgaaaattttctcccattttgtaggttgtctgttcactctgatggtagtttcttttgctgtgcagaagctctttagtttaattagatcccgtttgtcaattttggcttttgttgccgttgcttttggtgttttagacatgaagtccttgtccatgcctatgtcctgaatggtaatgcctaggttttcttctagggtttttatggttttaggtctaacgtttaagtctttaatccatctcaaattaatttttgtataaggtgtaaggaagggatccagtttcagctttctacctatggctagccagttttcccagcaccatttattaaatagggaatcctttccccattgcttgtttttctcaggtttgtcaaagatcacatagttgtagatatgtggcattatttctgagggctctattctgttccattgatctatatctctgttttggtaccagtaccatgctgttttggttactgtagccttgtagtatagtttgaagtcaggcagcatgatgcctccagctttgttcttttggcttaggattgacttggcaatgcaggctcttttttgattccatatgaactttaaggtagttttttccaattctgtgaagaaagtcattggtagcttgatggggatggcattgaatctataaattaccttgggcagtatggccattttcacgatcttgattcttcctacccatgagcatggaatgttcttccatttgtttgtatcctcttttatttcattgagcagtggtttgtagttctccttgaagaggtccttcatatcccttgtaagttggattcctaggtattttattctctttgaagcaattgtgaatgggagttcactcatgatttggctctctgtttgtctgttattggtgtataagaatgcttgtgatttttgtacattgattctgtatcctgagactttgtagaagctgcttatcagcttaaggagattttgggctgagacaatggggttttctatatatacaatcatgtcatctgcaaacagggacaatttgacttcctcttttcctaattgaataccctttatttccttctcctgcctaattgccctggccagaacttccaacactatgttgaataggagtggtgaaagagggcatccctgtcttgtgccagttttcaaagggaatgcttccagtttttgcccattcagtatgatactggctgtgggtttgttatagatggctcttattattttgagatacgtcccatcaatgcctaatttattgagagtttttagcatgaagcgttgttgaattttgtcaaaggccttttctgcatctattgagatagtcgtccggtttttgtctttggttctgtttatatgatggattacatttattgatttgcatatattgaaccagccttgcatcccagagcctgggcaacttctagagaaaacagatttgtttgcctcacagttctgcaggctgtactggaagcatggcaccagcatctgtttcctgtgacggcctcaggctgctcccactctggcagaagggaaggagggtctgtctgtgcagagaccacagagatcacatggcaagagagggagcaagggggagggcgagcgatggagcttccaagctctttttaacaaccagccctccgggaactaatagagggggaacttgctaaccccatcatgtggggcagcattaatctattcatgatggatccacctccatgactcaaacaccttcccataggcccaaacttccacactgggggttaaatttcaatatttcagtgtgaggtttcaaagggtcaaacatctaaactaaagcagctgtatcctcagcatgttctatggtttctatgagagctgtaactgagaaagcaggagaaagctgggtctcccgccatcaggctgcttgtcctaaggagatgttccatgtggttacctgtcaatcaagaaatgagacaatccataaagaggaactgctatgattagcttcttattggattcccatcttcctccaggtatctgcagacacctgcatgttctgattgggacctcagtggtcatcttcctcttcatcctcctcctcttctttctcctttatcgctggtgctccaacaaaaagagtaagtctcacgaagcagaggccagagagctcagggccatgtggggaagcaggatgggagcacgcgggtgtgtgttcctcactggcaggatggtccctggcccaagggaggagccacagaggcagggctttctagagagagcaccagacaacctgcccctgccttcagctcacagaccattgcctggttctgaactgtatcctcacatcccctgcagctactgacatccagaagcttccatgacaggcagaaagtgggagacagaatcaatgggatgccaattgagagcacttcatgggatggggtcttgaactcagagagatagaatgtctgagtctggatgttggcagctgaagagcctcaggcacctacagcctccccctgtgggttggtgtctgcccatgaaatgaggacccagaagggccctccaagcggttttgatgacttccgtctcctacagatgctgctgtaatggaccaagagcctgcgggggacagaacagtgaataggcaggtaggtcctcctcggcccagcctcacggatacagtcttatccctaatagtcctgaaaaatgtgagcaccctccctcactcagcatttccctctctccaggactctgatgaacaagaccctcaggaggtgacgtacgcacagttggatcactgcgttttcatacagagaaaaatcagtcgcccttctcagaggcccaagacacccctaacagataccagcgtgtacacggaacttccaaatgctgagcccagatccaaagttgtctcctgcccacgagcaccacagtcaggtcttgagggggttttctagggagacaacagccctgtctcaaaaccaggttgccagatccaatgaaccagcagctggaatctgaaggcatcagtctgcatcttaggggatcgctcttcctcacaccacgaatctgaacatgcctctctcttgcttacaaatgcctaaggtcgccactgcctgctgcagagaaaacacactcctttgcttagcccacaagtatctatttcacttgacccctgcccacctctccaacctaactggcttacttcctagtcctacttgaggctgcaatcacactgaggaactcacaattccaaacatacaagaggctccctcttaacacggcacttacacacttgctgttccaccttccctcatgctgttccacctcccctcagactatctttcagccttctgtcatcagtaaaatttataaattttttttataacttcagtgtagctctctcctcttcaaataaacatgtctgccctcatggtttcgataatgtgactctttattcgccaaaagtttccagtgttatcattactatgtccatataacctgatatgttctctactgggttctcagccctggactctgagcttctggaagcagggtggagcctcatttgtctctgggactccaatttccatccaaagatgcagcacataggaggttccaaggatcgtgaatcacatgaacaagtgatattcttactctctgcagacctggaaagctggcagagtcattccaagatgaaacatttgtagagtcataggccttgttagtctcatctccacagggacacatgtcaacacatcatctttcatactataaatatacagtcgctcctccatatctgtggggtttacaggtgtttattgaaccaaatataaatcaaaaatattcagagaaaaaatccacaaagttccaaaaagcaaaaatactatattgtgtggacacaagtgaggtggtgtgtaggctgtatcaggaattataagtaatctagagatgatttcatgtatacaggaggatgtgcatgggttatatgcaaacgctgtgccatttcatgcaacaggcttgagcatctgcagattttggtgtctggtagggaggggggtttcctggaaccaatcacccatgaatagtgaaggacaactgtatataattttcattcatcaattttataaataaatcatcaaaatgtatgataataagataaaaaattagcagtgtttttatggtgtgaaaataagcttagatttattttttcctgcttgtaaccctctggtccaatgttatttactgagaagacattctattccaccttaatccgcatggcagcctctgtcaactataaaaggactgtgtgtacacagatgtattttacacactcttttctgctcagtggctctctgtgtccactctcatgaggatgctgcactttatgtggccttatagaaccccttaaaatttggcagcctgaatcctctaatttctccttcctctttaagattgccattattattattattggctatttgcttttccatgtaaatttgtaatcatttttctcatttccaccaaaaacaatgcttgtaattttgttgtgactcccttacatctacaggtaagttctgtcctatagaaacataatgcaaaccacatgcattctttcaaacttgctagtatccaaattaaaaagctaacaagaaacagataaaattaatttaagttaacccaatggacccaaaatattattaacccaacagacccaaaatattaacctaatagatccaaaatattattttattatacaagtagactcaaaatattatcatttcaacatgtaatcatgtgtcatcttggaaaacatcagatccctgtctaggtgggcaaagatttttcttcgtaatatctcatttccacatttccacttggcacagaaactgcccccaaggctcaggatactaagatgcagtaggaatgggtagatgtatctggaggaaagtgactgaatgaaattgagacatcagagtctgggaaactcactagaactacagggacagtgtgggggagggaattgggagatgttgatcaaaggatacaaactatcaggtattcaggaggaatgggtctgaagatctcttgtacagctttgccactatggttgacaatactgtactctatacttgaaatttaccaggaaagtagatttttttttttaaatatggaacacttcacgaatttgcgtgtcattcttgcgcaggggccatgctagttttctctgtatcgttccaattttagtatatgtgctgccgaggcaagcatgggagagtagattttttttttttttttttttttttttgagctggagtcttgctctgtcacccaggctggagtgcagtggcgcgatctcggctcaccgcaagctccgcctcctgggttcacgccattctcctgcctc[175 bp omitted]cccggctgggagagtagatcttaagggtcctc[140 bp omitted]atggtgaaaccctgtctctactaaaaatgcaaacattagccaggcgtggtgacacaagcctgtaatcccagctactcaggaggctgaggcacgagaattgctggaacctgggagcggaggttgcagtgagccaagatggcaccactgcactctagcctgggggacagagtaagacttcctctcaaaaaaaaaaaaaaaaaaaaaacaataaccctgcgagatgatggatataactagcttgactatgatgatcatgtcaccatgtatacatacatcaaaacatcaagtgtaatacaccttaaatatatacaatttccatttgtcaatcatatctcaataaagctaaaagaaacctctaagtttcaactttattttcagaaagctgtgccatgcttacctcagtgcctaagtatactctaattcatggaaatggcctttaaaactgcagagagtggctgggtgcagtggctcacgcctataatcccagcactttgggaggcggaggtgggcagatcacgaggtcaggagttcgagatcagcctggccaacatggtgaaactctgtctctactaaaaatacaaaaaatagctgggcatggtggcaggtgcctgtaaatctgagatactcaggaggctgagacaggagaatcgtttgaactggggaggcagaggttgcagtgagccgagatcctgccattgcactccagcctgggcgacagggtgagactccatctcaaaaaaaaaaaaaatactgcagagagttaaggccctcactggacactctccggtacctctgaggtcagtggatagagaagcagctccccttcttcttcctcgaaacaaaggcctccttccttcttaggtgtttgagacaaattctccacacaggtgcagctgagtgctgtaaagtcccactgagagttgaaggtccccactgccagtcacagttcggtcccactgagggttgaaggtccccactgccagtcacagtttggtcccattgagggttgagagtctccactgccagtcacagtttggtcccattgagggttgagagtctccactgccagtcagtttgggcttattagggtttatgctgtgcacggagaatggaacctaccaatcaactcttagtgaccagttagacagattcaaggcaaatttccctgctgggaaatcccaaatcccaaaatatgcagagaccaatagatgcctcaattcttccgtgtctccgtctaaatccttgggtcactgtgactcctgtagttatgtggcttgtaattccttgggccgtagaatggctatgataggccctgtgctaaggggactggtgacagttgagacaggaacatggaagctatagtagtcagggttctccagaaaaaaaaataatcaacactaataatgatagatatatagataatgattgatagacaaataatgatagatatataatgatatcacaaataatgatagacatatagttggataatgacagatatataatgattgatacacagatagggtatttatatattggcttatgcaactatgtagactgacaggtcccatgatctgccatctgcaagctggagacccaggggagtccacgtgtagttccagtctacgtgcaaaagtctgagaaccagtagagttagtggtatacgtaacagtccaaaagctagcaggctcatgccgggcatgatggctcacgcctgtaatcccaacactttgggagaccaaggcaggcagatcacctgaggtcagagttcaagaccagcccggccaacatggtgaaaccccatctttactaaaaatacaaaaattagccgggcatagtggcattcgcttgtaatcccagctactcagaggctgaggtacgagaattgcttgaacccaagaggtgaaggttgcagtgagccgagatcatgccacagcactccagcctgggtgacagagtgagactctatctcaaaaaaacaaacaaacaaaaaaagctggcaggcttaacatctaaagagtcaatgttttagtgagagttcaagagccagaaaagactgatgtccaggcaaaaggaacttcatcttacattaccagttcaatgttttgttctattcaggtcccacctgattgaatgaggccgactcacattagggagagcaatctgctttataaattacactaattccattgataatctcattcagcaacacccccacagacacacacagaataatgtttaaccaaatatctcagcaccccatggctacgttaccattcctgttccacaaaaggaggaaacaaaagaacaaaaccacaccaaatgttgtggtaagttgacaaaatctgttccagcccattagtaaatattggccactgaagttcctgaaattcaacaattagtaagtatctctctcccaatagaaagccacgtcatttgtaaaccataacaatagcttttgtttttttgagacacagtctcgctctgtgttgcccaggctggagtgcagtgatcttggctcactgcaacctctgcctcctgggttcaagtggctctcctgcctcagccttccgagtagctggaattacaggcacccgccaccacacccaagtaattttttatatttttagtagagactgggtttcaccacattgaccaggctggtcttaaattcctgaactcaagtgattcacctgccttggcctcccaaagtgctgggattacaggcatgagctactgcacccagccaacaatagtatttttaattaggtcatcctgcctttacaatctctgcattttaaatactcaactaagagtacagccattatttgtctttcacccaaagtcccattcaagtgagaacaaaggaatgaataaataaggcataagtaacaaaacaacaaaaaaagaaaattagaatgcggtcaatttcatgcaatcatcaacaccaaatttccagaacgtagtatttccaaatttcccgaacgtaaatatgtatgtggaaattaacaaaatgtggcaaaacaaaaggtcacttaaatttgcacaaatgaaacagtcaacatggaagctgatcggctttctgaaatatgggacaagctcaggacttcaaaatacttcg[187 bp omitted]tggtggcggatgcctgtagtcccagctactcgggaggctgaggc[131 bp omitted]gtagaaggtttaattaggaatatttcactctccatacctgaagaattcgtgatagccaggagtctacaatcaaaataacataaataataagataaaaataaaattaatttgaagccataaaaaaagaatgagttcatatgttttgtggaaacatggatggagctggaggccattatccttagcaaactatacaagaacagaacaccaaatacagcaggttctcacttataagtggaagctaaataatagaactcatgaacacaaaaaagggaaaaacagacaatggggtctcctttagggtggagggtgggaggcgggaaaggagcaggcaaagtaactattaggtaccaagcttattacctaggtgatgaaataatctgtacaacaaacccccatgacacaagtttacctgtataacaaaccttcccatgtacccttgaacctaaaataaaagttaaaaaaatactcaatgagcaacaatgtacattatttgaggataattatattaaaagcccagacttcaccactacacaaaatatccacgtaataaaatttcacttgcgctccttaaatttatacaaataaacaaaaaagtataataaaatagtagattctttctttagagatgacaaatagtgccagagaaaatgcctccacactctggcattgagatcatctccaggataagggtatactgcatgcctggtcaagtccaagtaaatatactcagaccatgaatctcagagatgaaacataggttcagaacagacaaagccacagagcttttgactaatggcccagtgaaggcaatgtctgcctgtatggtatccaccaccttatattctgtcccaagcccgtctatttggatgtagcatctggttcaaagatgaatttgaacaccattagacactggcttaatgaaaattcacttctcattcgtttctcatctgaaacataaatagaaatataggtcttaggcaggaggatttcttgatgccagaagttagagactaccctggccaacatagaaagaccccatctctatttaaaaaaatatacatatatatgtcttctcttgggctccacccaagagcaacctggaactaagttattcggcaacgaactgttccactttgttgtgaggcaatagatgtggaaattccctgacgaggggctctgtcctcatacttcctgcggagcttattgtcgtaagaatatctgtcatcctgctaatgtgcattgaaaggagagcaacggggctgaggccgtgtcagcacgatggaccccaaacagaccaccctcctgtgtcttggtgagtttcagagtaaaagtgggttagaggggaagatagagaaatcccaaaataatcagggtgtctcttaacagtgtgactaggagattttagtggctgccaaggagattctgatctccttagtggaaaggccgtctttgtcaatgtatctataactttgtctctacccaagcccaagctagcttgtggggctcaaggtttaatatttgtattaaacctatagtgtgttatctgggattcatgatggtcccaaggttcttatcaaggagagacttagaggctggaatctgaaaggtaaaaataaagaatgaacctcaaaactgtgattgttgtggaaggaaaacatatgatagaaccccatatagaaatatggttactagtattttgttgaagatttttgcatttatgttcaacaaagatattatccagaagttttctgtttttgttgtatctctgccacattttgttatcaggataatgttggcctcatagaatgagttggggaggagtccctcctccaggatttttttcaatagtttcagtaggaataatactagctcttcttggccgggcgcagtggctcacacctgcaatcccagcactttgggaggccaaggcaggcggatcacaaggtcaggagatcaaaaccatcctggccaacatggtgaaaccctgtctctactaaaaatacaaaaaaattagccaggcgtggtggcgggcgcctgtagtcccagctactcgtgcggctgaggcaggagaatggcatgaacctgggaggcag[131 bp omitted]gtactggtctttttctggtctgtcattacagagggtgatttgtcgtaaaggttggaaatggaagcttgatttttcataaatctctctcttccagtgctctgtctgggccagaggattcaggcacaggaaggtaagtgtcctgtaaatctctcccagcccctttagaccctcttgggagctctaggataaagaaattgaagaatagcctgaagcaccattcttattttaatccccattctagttgtttctgctgtgcttctcttgcataatttctatctcactttgttatctccaaacccttcagactcattaatgctcaggcctggatttatagttagtccttgcctgtgttagactgtccatgaaggatctgtaatttactgaatgctcaaactgcaagaatgaggaagtcaggagtcatctgcccaatatccttccttatgctgattctattttgttttagcaacccacttcctcccgtcacttcatttaaaaggatgctgccatagtctaaccctactgaacactctagcattctgtagtactactgcagtactaagcatgaggcagtcttagtgtactactgaatattctgccaccccaactactactgccttagcctcctaatgggtgtgagccccacgtccatccatgtcttctctcttccagctccttctaaagcctgaattatttgtgtgttgaacaatactcattcttcctatccatgagcatggaatgtttttccatttgtttgtgtcatctatgatttctttgaccagtgttttgtagttctccttgcagagatctttcacctccctggttagctgtattcccaggtattttattctttttgcagtaattgtgaatggattctattcttgatttggctctcagcttagatgtttttggtgtataggaatgctactgatttttatatattgattttgtatcctggaactttgctaaagttgtttatcagattaagaagtgtttgggcagagactgtggttttctaggtatagaatcatatcacctgcaaacagggatagtttgacttcctttcttcctatttggatgccttttatttctctcttgcctgattgctctagctaggacctccagtactatgttgaacagaagtagtgagagacggcatccatgtcttttgccagttttcaaggggaatacttccagcttttgcccattcaatatgatgttgactgtgagtttgtcatacatcattcttattattttgaaatatgtttcttcaatgcctagtttgtcgaggttttttagcataaagggatgttgaattttatcaaaagctctattgagaggattatgtgtgtggggagggttgttctatttatgtgatgaatcatatttaagatttgtgtatattggccgggcactgtggctcatgcctgtaatcccagcactttgggaagccaaggcttgtggatcatgaggtcaggagatcgacaccatcctggctaacacggtgaaacctcgtctatactaaaaaacacaaaaaaattagccaggcgtggtggtgggcacctgtagtcccagctgctcgggaggctcaggcaggagaatggcgtgaatccaggaggcggagcttgcagtgagccaagttcacgccactacactccagcctgggcaacagagcgagactcctatatcgaatcaaccttgcatcccagaaataaagcctacctgatggtggtggattagctttctgatgtgctgctggatagtttgctagtattttgttgaggatttttgcatttatgttcaacaaggatattgtcctgaagttttctggttttgttgtgtctctgccatgtttttgcatcaagatgatgctggtctcatagaatgagctggggaggcattcctcctcctgaatatttttggaacgtttcagtaggtatagtaccagctcttctttatatatcagatgggattcagctgtgagtctgtctggtactgggctttttctggtctgtaggatttttattactgattcaattttggagctcattattggtctgttcatgtattcaatttattcttggtttgatctcaggagggtgtatgtgtccaggaatttctccatttattctggattttctagtttgtgtgcatagaggtgttcataatattctctgatgattgtatttctgtggggtgagtggtaatataccctttgttgtttctaattgtgtttatccggatcatctctcttttcttctttattagtctaactagtcatctgtcttactaattttttcaaaaattctactcctcgatttgctgatcttctgaatgctttttcgtgtctcaatctccttcagctcagctctgattttggttatttcttgtttcctatgagctttggggttgatttcctcttggttctcttagttcctcttgttatgatgttaggttgttaatttgaactttttctagctttttgaagtgggagtttagtgctataaacttcccccttaacactgccttagctgtgtcccagagattctgctatatttacccaaaaattccagaacagactgcttaatttccatgcattgtacagttttgagtggttttcttagtatttattcctatttttattccactgtgctctgatttcgc[132 bp omitted]cctcagcctcctgagtagctgagactacaggtgcccgccaccc[131 bp omitted]caccgtgcccagcctgctaaggattgctgtatgtctgattgtatgattgactttagagtatgtgccatgaggcaatgaaaacaatgtagattctgttgttttgggggtggagagttctgtagatgtctgtcaggtccatttgatccactgctgagttcaggtcctgaatatctctgtttgcctcaatgatctaatactgtcggcgggatgttaaagtctccccctattattgtgtggttgtctaagtctcttcgttggtctctcagaacacgctttatgaatccgggtgcttccatgttaggtgcatatatatttaggatagttaggtcttcatgctctttttttaattttttttttctttttctttttgattcagcagttgggctattacacactccttagcagattccgacttccgtggccactgtcctgctatggtcttcatgttgaattgaaccctttaccatgatttaatgcccttctttgccttttttgatctttgttggtataaagtctgttttgtctgaaattttaatagcagctcctgcatttttttttttttttggctttccatttgcttggtagatttttctccatttctttactttgagcctatggatgtcattgcatatgagatgggtttcttataggcagcataatgttgagtcttgcttttttttttttttttttttttgagatggagtctcactctgtcacccaggctggagtgcagtggtatgatcttgactcactgcaacttctgcctcccaggttcaaatgattctcctgcctcagcctcccaaatagctgggattacaggtgtgtaccaccacgcccagctattttttttttttattagagatgggatttcatcacattggccaggctaatgtcgaactcctgacctcaaatgatccacccacctcagcctcccaaagtgccagggttacaggcgtgagccactgcacctggcctcttgcttctttatccaacttgccactctctgcattttaattaggacaattagtccatttacattcaaagttagcatttacatgtgcagattttttcctgtcatcatgttgttagctggtttggttattatgcagacttgtttgtgtggttgttttatagtgtcactggtttatgtacgtaagtgtgttttctattggctggtgatggtcttttctttccatatttagcgttcctcttaggacctcttgtaaggcaggcctgatggtaataaattccctcagcatttgcttgtctgtaaaggatcttatttctccttcacttatgaaacttagtttggctgggaatgagattcttggttggaaattcttttcataagaacattaaatataggcccccaatctcttctggattgtagagtttctgctgaaaggtctgctgttagctcgatggcattccctttgtaggtgacctgccccttcttttttgctgccttttcacatttttttttttttttttgagactgagtcttgctctgttgcccaggctgccaggctggagtgcaatggcgtgatctcggctcactgcaagctccgcctcccggattcacgccattctcctgcctcagcctccccagtagctgggactacaggtgcccaccaccacgcccagctaattttttatatttttttagtagagatggggtttcaccatg[137 bp omitted]tttgtgtcttggggatgctcttcttgtgtagtattttgcaggggttctctgtttcctgcatttgattcttggcctctctagtgacgttggggaagttttcatgaacaatacactgaaatatgttttccatgttccttgctttctccccatctctttcggggatgccaatgggctatttggtctcttttcatgatcccatatttcttagaggttttgttcattaatttttattctttttcttcatttttgtctgactgaattagttcagagagccagtattcatgctctgagattctttccttattttgctttattttgccattaatacttgtgatcgcattatgaaatctcgtagtgtgtttttcagctccatcagatccgtttggttctttcaaaatgaccatctcatagattagcccctctgtcattttattgtaatctttaggttccttgcattgggtttcaactttctcctgaatcttgatgaccttaatttctatccatattctgaattctatttctgtcatttcagccaggtaaagagcccttgctgggaagcttgtgtggtaatttggaggaaggaagacactgttgctttttgagttgatggagttcttgctcagttctttctcatccatgtgggctaatgttcctttgagtgtgctgcaatttgaatttttttcttttttcttttaaccgtgatgtaatttgagcacagtcagtagacttcttttctggatggtttcagagggctggggcttcgcacagggtctttatttatagctaaattcttgtccttggtttcacagggaggtatattagcgagcatttttggtgttgaagtttgggctgcaatccggtaaatgatgcttcagcacaacggccagtaggtcattcctcatgattgccgctgtgctccctctcacgctctgaaagtgcgggctcctctcccacccaagtgctggctgcagatctgggctcggcactcccaggctgcacatcacagctctggggtgagctcagactttatgttccctccgtggcttgggggcagcaggggaagggaccttagcagcggttgtggcagacggcctttcacttgtcccttggaactccaccccagagagatgtggagccactatcagtgcgatgagccaagagtgaggcgactgcactgtgggtccaagctaggggccctgcctagtgatgagcaggggggacaggtgggtcacaggggtgacagactggcctcttctccttagggcagtttgccggaggtgtggttgaagcactcagagtctttgctccttccccagtctgagggcagcaaggccagtaccaccgcagtggcagcggcagagtgaccttccgttgcctctgggagctccgccacagagaaacgcagactcacagctgctgggaacgctccgccagagggtggggctgttgtgccgcggaatcaagctggggcttgttgaagagcagggggttgagggctcacagggagaggagactgagctcctctccgtatggcgactgcggtgtgctggaagcatgaatgaaggccgggcgcggtggactcacgcccggaatcccagcactttgggaggccgaggcgggcggatcacgaggtcgggagatcgagaccatcctggctaatctggtgaaaccccgtctctactgaaaacacaaaaaatgagccgggcgtggtggcgggcgcctgtagtcccagctactcgggaggaggatgaggctgaggcaggagaatggtgtgaacccgggaggcgcagcttgcagtgagccgagatcgggccactgcactgcagcgtgggcgacagagcgagactccgtctcaaataaataaataaataaataaataaataaataaataaataaataaataaattgaagcatgaatgaaggccccaggctccttgcttcttccccagatcacgggcagcagaggcagaacccttgccatggcagtggcagaggggctgtcagttgcctctgggagccactccccagggaaacacgagccaccaccagtgagtgtgctgagggcggggcagctgctctgcactcccgagctgggggctctgcctggtaaagtgggggtgggagctcacggggaagagagactggactcctctctgtctgatggctgtggcataatgaccgggcccccacacatgaaaaagaattctgggaactcaaaaagccagtgtgtccccaccatggaccccttggattgtgtttcaaatttctcctcaatttcgaagagcgtcctggccatccagattctgaattctataaccctcgtttcattcatctcaatgtagctaagaaccagatttctggggaactatcgagttgccagagttcttgtgttgattcttttttttttttcttttttttttcttttttgtggcagagtcttactctgtcgcccaggctggagtgcagtggcacgatctcagctcactgctgcaaccttcacctcccgggttcaagcgattctcctgtctcagcctcctgagtagctgggattacaggtgtgtgccaccacgcccggctaatttttgtatgtttagtagagcccgggttttgtcacgttggtcaggctggtctcaaactcttgacctccggtgatctgcccacttcagcctcccaaagtgctgggattacaggtgtgagccaccgcgcccggccttggtgttgattctttctcttgtgtgagggctggtgttcctttaactgtgatgtcggttgagtacagtcgcttggcttcatttctgggtgttttcagatgccaggactctgcacaggatctttatttgtggctgaatttttcccttcattgtatactggcaaaatttttcagtgttgtattttgaagtgtgatccagtaggtggcacttaaaagggttggccagcatacaggatcttagccacaaggctcttttgtagttttgtttcgttttttgtttcgttttttgacacagggtcttgttctgtcgcccaggctggagcacagtggcacaatctcggctcactgcagcctctacctatcaggctaagtgatcctcctgcctcagcctcctgagtagctgggactacaagcacgcagcaccataaagagaaaatttttgtaattttttttttttttttgtagagatggggtttcaccatgtttaccaggctggtctcaaactcctgggctcaagcaatctgcctgccttggccccctaactcttgtattttgacaaagtcggcagtagtgctctgtggttgtgaggaggggtgactccctcgcctggtccattcttgggccttggaggagcctcctacagtcactggctctgcacccactgtttcctttgttaggattgttctgcccacggggctccctcaggcagggcatggtgggcagacaggctgtatccttccccggccagccctatggagggaggaccaccccgcacctctgcaggctgatgaaatcaggtgtttcacccctctgaacgttctgagaatgagggctcctcacggcttggtcgccacctaacgtggtgagtccttctcagcaagggtgattggagccacatgatctgccatctcagtgcttcccaggggaacacagagctactgggcatggtggctcacacgtgtaatcccagtactttaggaggc[137 bp omitted]tgaggcagaagaatggtgtgaacccgggaggcggagcttgcagtgagccaagatcacaccactgcactccagcctgggcaacagagtgagacttcatctcaacaaaaaaagaaaagaaaagaaaaacacagagctgcacaccccacagagttcaggcagaagggggtctgcagcgctggaagacccagcaagcctggcccgtctggctgcaagtggcaggggtgggtggagtcacccacttcaccatctgggtgctttccagggaagcatgcagccacgaccccgggcagagttcaggcagaagctgggccactatgctggaaactggccttgagccttgtggagtaacggcaggtggagccatctcactgctcccacgcaccatgcccgtggcctctgcgggggctgtggtaacggcacccgactgctctggggtcaatgcctgcggaggtccccctggcttcagtgttgcctctgcaaaaaccccagttgcagccaggtgcggtggctcacgcttgtaatcccagcactttgggaggccgaggcaggtggatcacttgaagtcaggagttcaagaccagcctggccaacatggtgaaaccccgtttctactaaaaatacaaaaattatccaggcatggtggtgggcacctgtaatcccagctactcggaaggctgaggcagcagaattgcttgaacccgggaggcggaggagctgagattgcaccactgcactgcagcctgggcgacaaaacaagactctgtctcgaaaaataataacaataaaaaataaagatggcaaccatagacactggagactactagatgggggggaagaaagggggttgaaaaactgcctattgggtactatgctcagtacctgggtgacaggatcaatcgtactccaaacctcagcatcacaaattatttaaatttttctctttttttaatttttttgttgttgttgttgagacgaagtctcactctgttgcccaggctggagtgcagtggtgtgatctcggctcactgcaagctctgcctcccaggttcacgccattctcctgccccaatctcccgagtagctgggactacacgcgcccgccaccacgtcctgctaattttttgtattttcagta[136 bp omitted]atggtaggttcttcacaccctaatgtatttttacttctcccacagagaaggaaaggaatggcttccccatggcaagccacctcagtctgggctttcttttcttccaggggactttcccatgcctttcatatctgccaaatcgagtcctgtgattcccttggatggatctgtgaaaatccagtgccaggccattcgtgaagcttacctgacccagctgatgatcataaaaaactccacgtaccgagagataggcagaagactgaagttttggaatgagactgatcctgagttcgtcattgaccacatggacgcaaacaaggcagggcgctatcagtgccaatataggatagggcactacaggttccggtacagtgacaccctggagctggtagtgacaggtaaggaaacatccagggtccacagccctggtgtgatttttttcttatttttaatagagtatttttcaagaagttttagatttacaaacaaaaaaaaattgatgattgcttcagagagttctcagccatctggcaccccacttcccccagagttaacatcttacattagtatggcacatttcttaccattaatgaacaaatatcgacacattcccagctacagtctacagtttatttacattttcttagtttttacctgatagtctttctctgttccaggatcccattcaagatttcacattgcggctgggagtggtggctcacgcctgtaatcccaacacttagggaagccgaggcgggtggatcacccaaggtcaggagttcgagaccagcctggccaacatggtgaattccccgtctctactgaaaatgcaacaatcgctgggcgcggtggctcacgcctgtaatcccaacactttgggtggctgaggtgggtggatcacctgaggtcaggagttcgagaccagcctggccaacacagtgaaacctcgtctctactaaaaatggaaaaaattggccaggcctggtggcacacgcctgtaatcccagctacttgggaggctgaggcaggagaatcgcttgaacccaggaggcagaggttgcagtgagccaagatcacaccactgcactccaggctgggcgacagggcgagactccatctcacacacacacacacaaaaagatttcacattgcattcaggtgtcatgtatctttatttttttttttttttttttttttgagatggagtcccgctgtgttgcccaggctggagtgcagtggcacaatctcggctcactgcaagctccaacctcccgggttcacgccattctcctgcctcagcctcccgagtagctgggactacaggcgcccgccaccacgcctggctaattttttgtatttttagtagagatagggtttcactgtgttagccaggatggtctcaatcttctgacctcgtgatccgcccgcctggcctcccaaagtgctgggattactggcgtgagccaccacgcccggcccccgaaaatgctgggattacaggcatgagccaccgcacctggcctcccaaagtgctgggattccaggcgtgagccaccgtgcccggcaggtgtcatgtatctttaggtttgtcttggctgtcacagcttctcagatgttgctggttttccatgaccttgtcagttttgagggtagtggtccattattttcaagggtactcccactactggaaattgtccgatgttttgctcatgactagactgagttatgggtcattgcaggcaagaccacagaagcaaagtgccatttcatctcctcatagcaaaggtttaaactgtccatgggaacatgactgtggatgttgagctggctgttgttgaaagcctggctgaagtagtaactgtggccagacaccgtggctcgtgcctgtaatcccagcactttgggaggctgggcgccgtggctcacgcctgtaatcccagcactttgagaagccgagatgggcagatcacttaagcccaggagaccagcctgggcaacatagtaagaccccatctgtacaaaaaatcaaaaaattagctgggcatggtggcacccacctgtagtctcagttacttgagaggctgagatggtaggatcacctgagcctgggaggtcgaggctgcagtgagccgtgattatgccactgccctcagcctgggcgacagagtgagaccctc[131 bp omitted]catggagaaacctcatctttactaaaaatacaaaaattagctgggcgtggtggcgggtgcctgtaatcccagctactcgggaggctgaggcaggagactcacttgaacctcggaggtggaggttgcagtgagctgagatcgtgccactgcactgcagcctcagtgacagagtgagactccatctcaaaaaacaataataggctgggcacagttgctcatgcctgtaatcccagcactttgggaggccaaggtgggcaaatcacctgaggtcaggagttcgagaccagcctgaccaacatggagagaccccgtctctactaaaaatacaaaaattagctgggcgtggtggtacgcacctgtaatcccagtttctcgggaggctgaggcaggagaattgcttgaacccgggagacggaggttgcagtgagctgagatcacgccactgcactccagcttgggcaataagagcgaaactccatctcaaaaaaatatataataataacaataataagaagaagaaaagaataaaggagaaaaggtctttctaatagctcactcttttctctcttaggcttgtatggcaaacccttcctctctgcagatcggggtctggtgttgatgccaggagagaatatttccctcacgtgcagctcagcacacatcccatttgatagattttcactggccaaggagggagaactttctctgccacagcaccaaagtggggaacacccggccaacttctctttgggtcctgtggacctcaatgtctcagggatctacaggtgctacggttggtacaacaggagcccctacctgtggtccttccccagtaatgccttggagcttgtggtcacaggtaggtaccgcccagtccagccctgtgtctgggttggctgtccagggccttgccaccgggcaggaatatgaagacgtgcactgagagtgaagtgaagagaggcaaaggctctcactccaggacagtggagagagaaaggcttccccaccacactttccgctttcacttcctcgctagagttctccagacagggttcattgaaaacttagtctgtggagaacagaagggctaactcagtttgtttcattttatttatttcattttattttccgggatagagtcttgctctttcgccaaggctggagtgcagtggcacgatctcgactcactgcaaccttcgcctcccaggttcaagcaattctcctgcctcagcctcctgagtagctgggaccacacagacagggtttc[145 bp omitted]ttgtagagatgtgattaggtatttagtgaattcaccaagtgaggagagaatgaaaagaaaacacaacctgcctggccgggcgtggtggcgtgagcctgtcgtcccagctactcaggaggctgaggcaggagaatcacttgaacccaggaggcagctgttgcagtgagccaagatcacgccattgcactccagcctgggtgacagaacgagactccacctcaagaaaaaaaaaaaaaacatggttgggcacgatggctcacgcctgtaatctgagcacattgggaggctgaggcaggtggatcacctgaggtcgggagttcgagaccagcctggccaacatagtgaaaccccatctccactaaaaatacaaaaattaaccaggcgtggtggtggtgggcgcctgtaatcccagctacttgggaggctgaggcaggagaatcacttgaccagggaggcggaggttgcagtgagccgagatcacgccactgcactccagcctgggcaacagagtgagactccatctcaaaaaaaaaaaaaaaaaaaaacacacacaacctgcccataatcacctccttcccagtttatagcacttccctgggaagcacagttccttgcccgtgaacacagtcttgctgactgatcagtgtggtgctggcgaagcatgagctcattgaggggatgcttgagggagtcccattttggcaagcgaaaaggaaaatgagctcccgtttcagggctctggggttgggatggaatggaacacaaccaccaaccattcatctccttgaattgtgtctccagactccatccaccaagattacacgacgcagaacttgatccgcatggccgtggcaggactggtcctcgtggctctcttggccatactggttgaaaattggcacagccatacggcactgaacaaggaagcctcggcagatgtggctgaaccgagctggagccaacagatgtgtcagccaggattgacctttgcacgaacaccaagtgtctgcaagtaaacacctggaggtgaaggcagagaggagccaggactgtggagtccgacaaagctacttgaaggacacaagagagaaaagctcactaagaagcttgaatctacttttttttttttttgagacagagtctggctctgtcacccaggctggagtgcagtggagcaatctcggctcattgaacctcttgggttcaagtgattcttgtgcctcagcctcccaagtagctggaattacaggcacataccactgcacccagctaatttttgtatttttagtagagatggggtttcactgtgttggccaggctggtctcgaactcctgacctcaggtgatccacccaccttggcctcccaaagtgctgagattataggcatgagccaccacgcctggccagatgcatgttcaaaccaatcaaatggtgttttcttatgcaggactgatcgatttgcacccacctttctgcacataagttatggttttccatcttatctgtcttctgattttttatatcctgtttaatttcttccttcattgttcttctctttttttatttattttatttatttttatttttatttttatttgagacagagtctcactctgttgcccaggctggagtgcagtggcacgatctcggctcactgcaacctctgcctcctgggttcaagtgattctcctgcctcggcctcccaagtagctgggattgcaggctcccaccatcacgcccagctacttttacagtatttttagtagagacggg[134 bp omitted]cccaaatataaatggttggtaagcatgccaaatatattcaataacccccctcctttatttttttttgttgaagtgaggctctccctatgttgcctaagctggtcttgaactcctggtctcaagcaatcctcctacctcagcctcctgctgtgttcatctacaaattgataagagtgaaagtcataatcctacaggaggattaccctatttatttcacaaaccctatttctaccggattttcatacaaggaatacaggcatgtgtttcacctcattaatttattttttcacttagttttgatgatattcacatatattatcaagtgtgcaaacattaaattcttgtgtacaaaactcaaatggtcttccaaataattccccattcttttttcttataaactttcacagctttacccttgacagactttactcaaggaaatctaagttggtcatatgtggctctttcactgattgctatttacttcattgtccagtagcttatgtatgaaaatataattataaaatgtaagggtcctacttccagtgaaactgaagggacttaggcccacttttatcctttactgagagcttatctctacttgataaaatttctactgtattcttggcttaactcaggtcctgtgattaaaaaaaaaatgcaaagtatttctaactttctttattgactgcttttcacactttatacaagttctggcccatatcttcagtttgttctgatttttttcaccaggtgtggtggcaggtgcctgtagtcccagctactccaggggctgaggcaggagaatggcgtgaacctgggaggcggggcttgcaatgagctgagatcacgccactacactccagcctgggccacagagcgagactccgtctcaaaagtaaacaaacaaataaataataaataaataaataaagggaaagtgccacaattttggatgaagggggttgagggactttacgtcaggtccaggacttggattacagagacacaatggggctagattcccagagatggataagattaaactcatataagtcgttttgctgacagaaggaccttgtttggaaaaagcgttttcagaataataaagttcctgagctcttcagaaaagtattttattgtcctgtaaccacagtaacaagtagccaccaaaactgatttttaacccatcatcaatgacaactcatctctgtgaagatgctctttttttttttttttttttttgagacggggtcttgctctgtcacccaggctggggagcagtgacgtgacctcggctccctgcaacctctctttcccgggttcagcaattctcctgcctcagcctccccagtagctgggattataggcacctgccaccacacgcagataatttttgtatttttagtacagacgggtttcgccatgttggccaagctggtcacaaacttctgacctcagggtgatctgcctgcctcagcctctcaaagtgctgggattacaggagtgagccacaaagcccggccactccatacgttttatattgttatgttaccatcagtcaggcagctccttgcttctaaaagtcatccaatcagactcatttcagtaaacacccaagcatgagtgacaaccaatcaaagtaatatcttcccaatgaccacacttttccagatgacgtcaagccacagaaggccctgaaaatccaacaatctctgaagtatacatttcccaggctgagcgcagtggctcacacctgaaatcccagcactttgggaggctaaggcaggcagatcacgaggccaggagttcgagaccagcctggccaacatggcaaaaccccgtctctactaaaaatacaaaaattagccaggtgtggtggcacgcacctgcattaccagctactgaggaggctgaggcaggagaatggcttgaacccaggaggcggaggttgcagtgagccaagatcgtaccaccgcactccagccttggtgacagagcaagactccatctcaacaacaacaacaaaaatggttgaaataaaacttctatgtgttgaacgattcctcttttaggcatagagtttcagttttacaagatgaaaatattctggagatctgtttcaaaacaccgtgaatacatttaacactgctatactgtacacttacaatggctaagatggtaaattgtatgttatgtttttactacaatttttttttttttttttctgagacagagtctcactcttgttgcccaggctggagtgcaatggtgcggtctcggctcaccgcaacctccgcctcctgggctcaagccattctcctgcctcagcctccagagcagctgggattacaggcatgcgccaccacgcctggctaattttatatttttagaagagacggggtttctccatgttggtcaggctggtctcgaactctggacctcaggtgatccacccgccttggcctcccaaagtgctgggatcacaggcgtgagccaccacgcctggcctacaatttttttttaacttttttttctgagatggagtctcgctcttgtcacccaagttggagtgcagtagtgtgatctcggctcactgcaacctctgcctccctggttcaagggattctcctgcctcaacctcccaagtgtgggagatcagtcagagtagcagaagaaattataggaataggaagcagcaaaccttcttggaaggccagggaggttggcatagcttcagatagtttggctgaaagcagccagattctcttttcaggagccaaacagcttagggcgcagatacaaaggaatgcggagtattttatctaaatagcttgcttagtcatatggtcctaaaatcaacctttgatcattctcgggcaagatggccctctccagggaggtggcggggggcggtgaccaggttaattacccacaggtgtgttgactcaaagcctttgttaattaaatctgtgctaaataaatgcaagcgttgccagcttagaggggctgcactctctttggctcctagtgccggcagccccctggcctgctctttcactgaatattggtgtctgaggacgtgtctcatctgtcgtacagctgggatctgcagaacagatcccccccgcacccaagaagctgggattacaggcacccgccgccatgcccagctcatttttgtatttttagtagagacagggtttcaccatgttggtcaggccggtctcgaactcccggcctcaggtgatctgcccgcctcagcctcccaaaagtgct[132 bp omitted]tcccaggttcaagtgattcccctgcctcagcctcccgagtagctggaactacaggtgcgcaccgccacgcccggctaatttcttgtattttcgtggagacggggtttcaccatgttggctaggctggtctgtttcatgcgcgtccgtgtgaagagaccaccaaacaggctctgtgtgagcaacaaggctgtttatttcacctgggtgcaggcaggctgagtccgacaagagagtcagcgaagggggataggggtggggccgttttataggatttgggtaggtaaaggaaaattacagtcaaaggggggttgttctttggtgggcaggagtggggggtcacaaggtgctcagtaggggagcttttgagtcaggatgaaccagaagaaggaatttcacaagataatgtcatcagttaaggcaggaacaggccattttcatttctttcgtggtggaatgtcatcagttaaggcaggaaccggccatctggatgtgtacgtgcaggtcacaggggatatgatggcttagcttgggctcagaggcctgacattcctgtcttcttatattaataagaaaaataaaacgaaatagtggtaaagtgttgggatggcgaaaattttggggggtggtatggagagagaatgggcgatgtttctcagggctgcttcgagcgggattaggggcggcgtgggaacctagagtgggagagattaagctgaaggaagattttgtggtaaggggtgatattgtgggattgttagaagaaacatttttcatttagaattactggtgatggcctggatgcagttttgtatgaattgaaaaactaaatggaataaggaaaggagaaaaacaggtattaaaggtctaagaattgggaggacctaggacatctaattagagagtgcctaaggaggttcagcatagccttgccagcaaagattatttatttacttcaagagttaagagtggtggtttggggatagcaccaggagatatcagctgtgatggcttggaaaaacagtgtaaaccagcagtgtaaacaagagcagggcatgtgtgagtagttgagaatggtgaataggagtatgactagacagaagatagtagggatgacaagtttttgggggcacattccaagttggtctggtgtctggaatgagactggggcttaataaaaaggagcgtctatacaggagctcaaatgggctgtaccctttagcattctgaggacaggcctgaattctgagaaaagaaagtggtaaaagtattgtccagtcttttttaagttggtggctgagcttggtgaggtgtgtttttaaaagactattagtctgttctacttttcctgaagactgaggactgtaagggatataaaggtttcactgaataccaagagcctgaaaaactgcttggctgatttgactaataaaggccggtctgctatcagactgtatagaggtgggaaggccaaactgtggaattatgtctgacagaagggaagaaatgacctcggtggccttctcagaccctgtgggaaaggcctctacccatccagtgaaagtgtctacccagaccaagaggtattttagtttcctgactcagggcatgtgagtaaagtcaatttgccagtcctaggcgggggcaaatccccgagcctgatgtgtagggaagggaggggacctgagcaatccctgaggggtagtagaatagcagatggaacactgagaagtggtttccttgaggatagatttccaggatggaaaggaaatgagaggttctaagagatgggctagcagcttgtaacctacatggaagaggctatgaaatatcgaccgaatagaatgggcctgtgaggctggaaggaggtattttccttggtctaagaaccatttgccttgtgtgggaagagattgatgggtggaagtttcagtgggggagtaggtgggagtgactgatgagaaggagaaaaactggctgtgggggacagaaattggcatgctagctgcttgtctagctaccttatcagcataagcatagatgtgagagacagaagttggaaagctagctgcttgtctagccaccttgtcagcataggcattgtctagagcaatgggatctgatgacttttgatggcctttgcagtgaatgactccagcttcctctgggagtaaagcggccttgagcagagtttttattaaggaggcattaaagatggaggacccttgtgtagtgaggaaacctctttcagcccatatgaccgcatggtggggcagaatatgaaaggcatatttagagtcagtataaatattgatgcatagtccttttgcatcagtgagggcttgagttaaggcaactaattcggcttgctgagaggtagtggagggggcagagcggtagcctcaatgatagatgtggaagatactatagcatagcctgcctttgctggtgagtggcgattaggcctggtggaactgccatcaataaactaaatgtgattagggtgaggaataggaaagaaggaaatgtggggaaatggggtgaatgtcaggtggatcagagagatacagtcatgggggtcaggtgtggtatccggaataatgtgggaggccggattgaagtatgggccagtaacaatggtaattgtgggagactcaacaaagagtgagtacagctgaaggagccggggagcagaaagtatatgcgtcaggtgtgaggaagaaaatagatttttggaagttatgagaactgtagagagtgagttgagcatagtttgtgattttgagggcctctaaaactattaaagcagcggcagccgctgctcacagacgtgagggctaggctaaaacagtaagatcaagttgtttggacagaaaggctacagggtgcggtcctggctcttgtgtaagagttctgaccacgctaaccatgcctaggaaggaaaggagttgttgttttgtagaaggtgctggggtttgagagatcactaggacacgattggcagggagagcacgtgtgtttttatgagaattatgccgagataggtaacagaggaggaagaaatttgggcttgactgaagtaatgggggctgtctgtgaagccttgcagcagtacagcctaggtaatttgctgagcttgatcggtgtcagggtcagtccaagtgaaagcgaagagaggctgggatgaagggtgcaaaggaacagtaaagaaagcatgtttgagatccagaacagaataatgggttgtagaggcaggtattgaggataggagagtatatgggtttggcactacggggtggataggcaaaacaatttggttgataaggtgcagatcctgaactaatgtgtaagccttgtctggttttaggacaggtaaaatgggagaattgtaaggggagtttataggctttaaaaggccatgctgtagcaggctttaatccttttaaagcatgctgtgggatgggatattggcattgagcggggtaaggttgattaggttttaatgagatggtaaggggtgcatgattggtcaccaaggagggagtagaggtatcctatacttgtgggttaaggtggggggatacaagaggaggacacaaaggaggctttggattgggaagaagggcagcaatgagatatagctgtagtccaggaatagtcagggaagcagataatttagttaaagtgtctcagcctaataagggaactgggcaggtggggataactaaaaaggagtgcttgaaagagtattgtctaagttggcaccagagttggggagttttaagaggtttagaagcctagctgtcaatacctacaacagttatggaggcaagagaaacaggcccttgaaaagaaggtaatgtggagtgggtagcctccatattgattaagaaggggacgggcttaccttccactgtgagagttacctagactgtctgtgatggtcctgtaggcttccgaggcgatcgggatcgggcagtgtcagtcttcagctgctaagccgagaagatctgggaaggagtcagagagccttgggccagagttctagctgctctgggagtggctgccaggtgagttgaacagtccgattttcagtggggtcccgcacagatgggatgcggcttaggaggaatcccaggctgtggacattccttggcccagtggccagatttccagtacttgtagcaagctcctgggggaagaggttctggaggaacccctggcagctgcggttcaggcgtttggagttctcgtgtgctggagatgtggctggggtttgtctcatctggatactggagtggaggcaaggaattgcaactcagaaatatgttgctatttggctgcctctactctattactgtacaccttgaaggcgaggttaattaagtcttgttgtggggtttgagggacagaatttaatttttggagctttatttaatgttgggagcagatttggtaataaaatgtatattgagaataagacggccttttgacttagggtctagggctgtaaagcgtctcagggttgctgccaaatgagccatgaactgggctgtgtttttaaatttgatgaaaaagagcctaaacactatctgatttgggagaggtcagataaagaaaaaggagcattaaccttgactatgcctttagcttcagccacctttttaagaggaaattgctgggcagttgggggagggctagtcatggaatggaactgtaagctggaccgggtgtgaggaggggaggtgataaaaggattatagggtggaggagcggaggctgaggaagaattgggacccagctcggcctggcgaggaggggagatgtcagatgggtctgtagaaaaggaagattagaaagactcagcgatgcttggggttgggactgacgggacaggcgggagggaaagaaggaagatttgggacgagttgcactgggcatagagactagggagggaccgatgtgtaaaagaatgcctggatgtcaggcacctcagaccgtttgcccattttacaacaagaattatttagatcttgtaggatggaaaaattgaaagtgccgttttctggctatttggaaccactgtcaagtttgtattggggtcaagcagcattgcagaagaaaataaggcatttaggttttaggtcaggtgtgagttgaagaggttttaggtttttaagaacacaggctaagggagaagaaggaggaatggagggtggaaggttgcccatactgaaggaggcaagcacagagaaaagagagagtagagacatggagggaaggggttcaggggttcttaccttccagaaaagcgggaaaggggtcagggcacagaagtaagggattggggtgcagagacaagaggtcggggtgtggaaataagggatcggggtgcagagataagacgtcagggcacagaaataagggatcgggggattcttgccccctagaaaagcggtacttgccactaagggtgaaggagaaggggttggggggttcttgcccccccagaaaagcagagaaggggtagagacacagagaaggagttgggggttcttgcccccccagaaaagcagtacttgccactaagggtgaaggaccaaggcaggcatccccatgtggtcagacacctctgaaacgtgggtgaataatcagagaggtgtccccgcgtgattaaacaccaagggaaggctgccttcccgagtccatgaccggcgctggagttttgggtccacgaataaagcgcgtctcctgtctctaccagaaaaggaaaggaactgaaattaagagaagggagagattgaagagtggaaaggagaaagtggttgagggatagtgagagaggttggagaagagagtaaaaagaggctgcttactggatttaaaattggtgagatgttccttgggctggttggtctgaggacgagaggtcgtaggtggatctttctcatggagcaaagagcaggaggacaggggattgatctcctaaggaagatcccctgattcgagttatggcaccaaatttcactcacgtccgtgtgaagagaccaccaaacaggatttgtgtgagcaacaaggctgtttatttcacctgggtgcaggcgggctgagtccagaaagagagtcagcaaagggagataggagtgcggccgttttataggatttgggtaggtaaaggaaaattacagtcaaaagggggttgttctctggcgggcaggagtggggttcacaaggtgctcagtaggggagcttttgagccgggatgagccaggagaaggaatttcataagataatgtcatcacttaaggcaagaacaggccattttcatttctttcgtggtggaatgtcatcagttaaggcaggaaccggccatctggatgtgtacatacaggccacagggggatatgatggcttagct[132 bp omitted]gttatgtgtattttgccacaatttttgaaaagtaccttctggtgtttagagacagaagatgagtggttgcctagggccgggagagtgaggggatcgtggtgatgggcagctggtcggcatggggttctgaagggcagtgatgacaacattctaaaattagactgtgttgacggttgcaccaactccgtgaataccacaaaatttaaaccattgaattatgcacttttaatgggtaattgtatggcat[146 bp omitted]gaaaccccatctctactttgaaaaaaaaaaaaaaagattacccggacgtggtggtgggcacctgtagtcctagctactcaggaggctgaggcaggagaatggcataaactcgggaggcagagcttgcagtgagtcgagattgcgccactcaggaggctgaggcaagagaatggcataaaccccggaggcagagcttgcagagagccgagattgcgccactgcactccagcatgggtgacagagcgagagtccatctcaaaaaaaaaaaaaaaaaaaaaaaagattagtaatatcctctgtgtcacttaccacttaagtgattgaatcacgacttgaaattcatcatctcaaacatggcttagagtctgtagaggggggacagtcccaggaatgctggtgtgggcttaaggctgaattaaatagatccagatggctcacacctgtaatcccaataccttgggaggccgaggcaggtgggaggctgaggcaggcggatcactggagctcctggagcgaagaaaggatgctagtggaaaaactggtgaaatcagaataaagtctatagttttattttttaaaggaggctgggcgtggtggctcatgcctctaatcccagcactttgggaggctgaggcaggtggatcagttgagttcaggagttcaaaaccagcctggccaacttgacgaaaccccatctctactagaaatacaaaaattagctgggcgtggttgtgggtgcctctaatcccagctactcaggaagctgaggcaagagaattgcttgaacccaggaggcggaggttgcagtgagctgagatcacaccattgcactccagcctgggctacagagcaagattccatctccaaataagagagacatgacaattaaataaattgtgtaatcttggattaaatcctaaaccaaatatatgtcactggtaaaacaagtggtgaaatttgaataaagtggatagatcagacaatagtgtcatatcagtgctatttcttgaccttgaacattaataacagaatgtccttggttttgggaaatataacctgaagtgattagaggtttagggcatcatatgcaaattagacacactttcttcggggagagagggagagggagagaggctgaatgatgaagcaaatgtggtaaaatgctaactttggggaaatctggatgaagaaattacagattttttttttttttatagacagggtaacactctgtcacccaggctagagtgcagtggcacgatcatggctcactgcagcttctacctccctgggctcagatgaccctctcacctcagcctcccaagtagctgggactataggcgcacagcaccacacctggc[131 bp omitted]tggaattatgtcaaaattaaaagctcaaaataataaaagacaatattcttatatttctttggtgaaggtaactatgttatggctgagagggtggctgaggtctgaggatccagcctacataagtctcctccatagagggcatccaagcgctccgtagggggaaggataaagaaaacacccagagttatgacagctgtgtaaggggaaacgcc[137 bp omitted]catggggaaaccctgtctctactaaaaatacaaaaattagtcgagtgtggtggcacacgcctgtaatcccagctacttgggaggctagaacaggagaattgcttgaacccaggaggtgaaggttgcagtgagctgagattgcaccactgcaccccagcttgagggacagagtgagattccgtcttaaagagaaaaaaaaaagaattagcacatttgtttgcctcaagaagatacaactagtcttgtacagtagtcacatgtatccaccaggatatattccaaggccccagtggatgctgaaaactacatagtaccttacatgtatatatatatgtatatacatatatacacatatacgtatatgtatacatacatgtatatatacatgtatgtatatacatatatgcatatatacatacatgtatatatacatgtatgtatatacatatatgtatatgtatgtatacacgcatacatgtatgtatacacgcatacatgtatgtatatacatatatgtatgtatacacggatacatgtatgtatatacatatatgtatgtatacacgcatacatgtgtgtatacatatatatgcatgtatgcatgtgtgtatatatacatatatgtgtatatatacgcatatacatgtatgtgtatatatgcatgtgtatatatacatgtacggtactatgcagtatatatacacatatatgtatatatgtatacatatatgtataaatgtatatatgtgtatatatataaaaggtatatatgtatatatgtgtgtatatataaaatgcatgaatttcttttttcttactgtagatcttaacaacttctgcatagaatttttttttattaagtggagagttagttacttacttaaaagaaatgtttcttggctgggtgtggtggctcacacctgtaatcccagcactttgagaggccgaggcaggaagattcacttgaggtgaggagttggagaccatcctggccaacgtggtaaaaaccggtctctactaaaagtacaaaaatgagctgggcgtggtgttgggtgtctgtagtcccagctactcaggtggctgaggcaggagaattgcttgaacccacaaggcagaggttgcagtgagctgagatcacaccactgcaccacagcctgggcaacagagcaagactctgtctcaaaaaaaaaaaaaaaaaagaaagaaaaagaaaaagaaaagaaatgtttcttttcttattaagttctttaaatgaaaagcttttcttttcacttttattttattgaaacattataacactatctttgaagaagatagtgttatcattccattctgatgaaaccaattaacttatccaagcatatgtatactgtacacagagaagccaacgtcaaaacccctatttttatctttttagattcagcagatacatgtgcaggttttttatgagtatattgcatgatgctgaggcttgcattaatgatctagtcaccaaataggtagattttcaagccttgctcccctccttacccaatgtttagcgctctcacttataagtgagaacatgtggtatttggttttcttttcttttttttttttttttttgagatggagtttcactcttgttgcccaggctggagtacaatggcaccatctcggctcactgcaaccttcaccttccaggttcaagcaattctcctgcctcagcctcccgagtagttgggactacaggcatgtgccaccacacccggctaattttgaatttttagtagagacagggtttctgcatgttggtcaggctggtctcgaactcccgacctaaggtgatccacctgcctcagcctcccaaagtgctgggatgacaggcctgagccaccgtgtctggccagtatttggttttctgtttctgtgttaactcgcttaggataatggcctctagctgcatccatgttgctgcaaaggacataatcttgtgatttttcaaggctgtatagcgttctgtggtgtatacatatcacattgtctttatccagtccacctctgatgggacctgggtggattccatgtcttcactattgtgaatcctgctgcaatgaacatacaagtgcatgtgtctttttggtagaatgatttattttcctttggctatatacccagcgatgggattgctgggctgaatggtaactctgtttgtagttctctgaaatatctccaaaccaaactgctttccacagtggctgaactaatttacacccaccaacagtgtataagtgtcccctttgctccacaatctcaccagcatctgttaatttctggcttttcagtaatggccattctgactggtgtgagatggtattgttgagggataatttaggaatcagagagaccgaggggttgaggaggatttattattattattattatttaggtgcaccggccccagtcagattaacatccaaaaagactgaggctcgaacagagagtccggttaccttttaagcattttgtggggttgggggagatctgtgcagggggaagcatattacagaagcaagaaacaaaggcagttattcaattgagacatgcatcacattattccttacttttcaagaaaaatatgttttacgacttgaggttatcctgtctagtgaccttgcagccgcacggcaagagaaacagggtcttcacaatgcctgggaaagggagagataaggctcactagccacagacagaaaaacaggcagttcatgtttaaaggactccacctctttctcttcctcggggggaactgggttttcttaaatacaactgagtttttgtttacacattctgtaatttcttttaattcctgttccagtatctcactgtgaaactccctatgtttttatacgattctcagggggtttcctctgggcatgattgggcacaacttcccacagtcagctctgggtacgacctccacattgcagaattgagaagttgacccagaaatgcattttgggctgagcagacaattgtcagagttgctggctagaccacagatgtgtcagagggaccacggcctttctgtaagctcatggtcagaggcggaggggagttgtgaacgttctgatgaaagcagtcaacgtgaaagcgctctggtgatgggcgctggtgctcacccaccacttcctgtgtatctatctccctggcccgcccggctcagtccccactgctcagcactaggccggcagaatctgagcgatgtcttccacactccctgccctgctctgcgtcggtgagttctggcgtggaaggggaatgggatcacggtgtgcctgggaggcaacaggtctcattactcccgtcttccagggctgtgtctgagtcagaggatcagcgcccagcagcgtgagtccttccttcaaagcccagggtcactcttccggattcaggccaagctccttccacccaagcacggctggggtgaggggacagggtgctggcttcccaggagagcttggggccagcagctgggtggagcctaaggttggggggagggggctccgctggaactccagcctctgattcccttccagagactctcccaaaaccgttcatctgggccgagccccatttcatggttccaaaggaaaagcaagtgaccatctgttgccagggaaattatggggctgttgaataccagctgcactttgaaggaagcctttttgccgtggacagaccaaaaccccctgagcggattaacaaagtccaattctacatcccggacatgaactcccgcatggcagggcaatacagctgcatctatcgggttggggagctctggtcagagcccagcaacttgctggatctggtggtaacaggtaactgtccggttctctaactggagagtgatctcagtctgcatccgggatgcagcatcatctatgaactcttccaagccccactcagacactgcttgtctcggtaggaggctggaaggaggggtgatccccatcacaatccttgcctacaaggggttgtctgcagaccgtgtctctacgtcctaggagcagatgtgtcctcagtcagtttctccatgacacagattctgagatagatatttgtatgcaggggtatgactgaggaatgtcctcaaaaacaatgcctgtgggccaggcgcagtggcttacactttgcttccctcacccatcacaggtggtgggttttttttttttttatctgttttgagacggagtttcgctcttgtcacccaggctggagtgcagtggtgcaatctccagtcactgcaacctccacctcctgggttcaagtgattctccagcctcagcttcccaagtagctgggatcacaggcacccaccactacgccacattttgtatttttagtagagatggggtttcaccatgttggccagggtggtgtcgaactcctgacctcagatgatccgcccgcctcaccctcccaaagtgctgggattacaggtgtgagccatcacacccagccaggtggtggttttctaaaaaaaaaaaaaaattagcttttttttttttttaacaatatggttgtttattattattatcaagtattatacatagttacatatacatacataattgtatgtgctatacaattaggtttgtttataccagcaacaccaaaaacacatgagcaatactttgtgctaggaaggctatgatgtcatcaggcaataggaatttttcagtttcattataatcttatgggaccaccatcatatatgtggtacattgttggccaaaatgtcattatgcagctcacaacagtatttcatgtccattcaaatatcttcttttgtgaaatgtctatttaaatcttttgcctatttttaaattgggttgcttatattttgattgattaggaaaagttatttctatattctgtgtcatatacttgtgttgaaatatatatattttttgtctgtgccttttcatttgctcagggtctttggaccttgtttggaggttctggcaggggaacacagctactcatttattcttttttttttaatttttttagtatttattgatcattcttgggtgtttctcggagagggggatttggcagggtcataggacaatagtggagagaaggtcagcagataaacatgtgaacaaaggtctctggctttcctaggcagaggtccctgcggccttccgcagtgtttgtgtccctgggtacttgagattagggagtggtgatgactcttaaggagcatgctgccttcaagcatctgtttaacaaagcacatcttgcaccgcccttaatccatttaaccctgagtggacacagcacatgtttcagagagcacggggttgggggtaaggtcatagattaacagcatcccaaagcagaagaatttgtcttagtacagaacaaaatggagtctcctatgtctacttctttctacacagacacagtaacaatctgatctctctttcttttccccacatttcccctttttctattcgacaaaaccgccatcgtcatcatggcccgttctcaatgagctgttgggtacacctcccagacggggtggcggccgggcagaggggctcctcacttcccagacggggcggccgggcagaggcgcccccccacctcccagacggggcagtggccgggcgggggctgccccccaacctcccggacggggcggctggccggggcttttttttttttttttgagacagtctcgctgcagtgcagtggtacaatctcagctcactgcaacctctgcctcagcctcaattctcctgcctcagcctcccaagtagttgagattacaggcatgtgccaccacacccggctaatttttgcatttttagtagagacggggtttcaccatgttgaccaggctggtctcaaactcctgacccaggaggtcgaggcttcagtaagcaaagatagtgccacggcgctccagcctgggaaacagagcaagaccctgtatcatttttaaaaatggttttagacggtaaatcttctattgtgtgtatttgaccaaaataataattaaaaaaaaaaaaaaaagctggctgccaggcatggtggcaggcccctgtagtcccagctacttgggagggtgaggcaggagaaacgcttgaacccgggaggcggaggttgcagtgagccaagatcgtgtcactgcactccagcctgggcgacagagagagactccatctctaaagaaagaaaaaaaaaaatagctggctgctcatcactgagtttctggtgtggtggccccaccttctctcatagaaatgtatgacacacccaccctctcggttcatcctggacccgaagtgatctcgggagagaaggtgaccttctactgccgtctagacactgcaacaagcatgttcttactgctcaaggagggaagatccagccacgtacagcgcggatacgggaaggtccaggcggagttccccctgggccctgtgaccacagcccacagagggacataccgatgttttggctcctataacaaccatgcctggtctttccccagtgagccagtgaagctcctggtcacaggtgaggaaatgctcaattccccacacccttcgccgccatgtgctacctggagccctgagggatccccagagagtgatggggagggtgtccaagggacgtccacttcctgggtgcctggttggtcatgtgaggaagaacaccagaagcaggaaggaggagggaacagagaaaggaatggtaaggcgggtggatcacaaggtcaggagttcgagaccagcctggccaagacggtgaaaccccgtctctactaaaaatacagaaattagccagacgcagtggcggacacctgtagtcccagctactcaggaggctgaggcaggagaatcgcttgaacccgggaggcgggggttgtagtgaaccgagatcataccaccgcactgcaacctgggcgacagagcaagactccatctcaaaaaaaaaaaaaaaaaaaaaagaatggcaagaccggaggaaaccaaaaacccttacttttttttctttatctccttttccaggcgacattgagaacaccagccttgcacctgaagaccccacctttcctggtgagtaactggtccttctaagctcagacgagcgatcagagcctcccag[141 bp omitted]cgaaaccctgtctctactaaaaatacaaaacttaggctgggcatcatggctcacacctgtaatcccaacacttcgggaggccaaggtggttggatcacaaggtcaggaattcgagaccagcctgaccaacatggtgaaaccccatctctactaaaaatacaaaaattagccgggcctggtggtgctcgcctgtaatcccagctactcaggaggctgaggcaggagaattgttgaacctgggatgcagaggttgcagtgagctgagatcgcgccactgcattccactccactgcacgacacagcgagactccatctcacagaaaaacaaaaacaaaactattatatatatatattcatcaagtgcatagtatacacagtgaactacactgtaacagtcagccaggcagatatcttgactgtgcagcacttagattctagcaggaggagacacaccatcggtcaacgtcaggatagcacacaggagggaatgatgctatggaaggaaaagacaaagtagaacagacttacagtgattgaaatggcagctagcaatattaaataggtttgtccagatggacctcacagagaaagaaggcatctgagcaaatgcgttcagacttgagttaatcatgtggctgtcaggagaaaggaggctctggagagaatgaaatggcatctgcctgtgccctggggcaggaagataactggggtaatacaataataactatgaggccaggagggttgaaaatgatgtttggaagatgacg[136 bp omitted]acacggtgaaaccctgtctctactaaaaaaaaatacaaaaattatccgggcgtggtggcgggcgcctgtagtcccagctacgcaagaggc[136 bp omitted]atagtgagactttgaatttcactatgtgtgaggagaaagaggtaatgatgacttaatgaggaaaatgaggcttaaatagaagacgggctgggccgggtggctcctgcatgtaatcccagcactttggaaggcaggggcggctggatcacttgaggtcaggagttcaagaccagcctggccaacacagtgaaaccccatctctactaaaaatacaaacatgagttgggtgtggtggcgcacgccagtaattacagctactcggggctgaagcaagaggattgcttgaactcgggaggcggaggttgcagtgagctgagatcacaccactgtactccagcctcagaggcctgccatcccagccctttgggaggccgaagcaggcaggtcatctgaggttgggagttcaagaccagcctggccaacatggcaaaaccccgtttctactaaaaatatgaaaaaaattacctgggtatgtggtgtgtgcctgtagtcccagctactccagaggctggaacacagtgagactctatctcaaaaaaaaaaaaaatagaagacatgactggtgcaaagacacatgctcacaagtgctagaatggaattcctcgtcaggttcgtccatctgtggacccttccactttacctgctggatgaagctcctgggacccgcagggtgaggtgggaccttgtaaagctgcagaacgtcatggggtagacccaagggaaggagtgctggggtggaggaggtcaaaaccatcctcttttcttcacttcccttatcatcagcagacacttggggcacctaccttttaaccacagagacgggactccagaaaggtaagtagacagctggggccataggctctgaaggaaggggctgggcatagagtagacctaggaagggaatctaaatgggaacaagagggtgtccttggccaggcgcagtagctcacacctgtaatctcagccctttgggaggccgaggcgggcagatcatctgaggtcgggagttcaagaccagtctggccaacatggcgaaatcccatctctactaaaaatacaaaaaaattagccaggcgtggtggcgtgtgcctgtagtcccagctacttgggaggctgagacaggagaatagcttgaacccaggaagtggaggttgca[134 bp omitted]ttctcctgcctacagaccatgccctctgggatcacactgcccagaatctccttcggatgggcctggcctttctagtcctggtggctctagtgtggttcctggttgaagactggctcagcaggaagaggactagagagcgagccagcagagcttccacttgggaaggcaggagaaggctgaacacacagactctttgaagaatgaccatgagacacagtggccatgggtggatctgaaagctggtgttgagcctgggcggcgtgagctctgtgttggacccacggaggagggagtcactgcagggaaagagggacactggcattccatttgtcagagcatcccggacgatgcagagggtgggagaactacatgctaaatttctttttttttttttttgagacagagttttctcttgttgcccaggctggagtgcaatggcgcgatcttggctcactgcaacctctagctctccatccctcgggttcaagtgattctcctgcctcagcctcctgagtagctgggattacaggcatgtgccaccaccccagctaattttgtatttttagtggagacggggtttctccctgttggctggtctcgaactcctgacctcaagtgatctccccgccttggcctcccaaagggctgggattacaggcataagccgctgcgcccagccactgaatttcttctgtagacaaatcctatggtctcttctaggctctaactatttttgtaccacttactgcaaaccatacttttaaccactctggtcttttctgaaaagatctctccttctttaacaggatggccatggaaatatttttttcctactttggtctttttttctttcctttctctgcaggaagccattcaaaatagttaataaccaatatagaataggtctgtatcaaatggttcaggaggcattgtggcaacaaccagttgtagagaagcagctttataagtgaatcctgccaggcacggtggctcacacctgtaatcccaacactttgggaggctgaggcgggcagatcacctgaggtcaggagttcgagaccagcctggccaacatgatgaaaccccatctctactaaaaatacaaaaactcggccaggcacggtggctcatgcctgtaatcccagcactttgggaggccaaggtgggaggatcacctgaggtcaggagttcgagagcagcctggccaacatggtgaaaccacatctctactaaaaatataaaaattagccaggtatggtggcgtgtgcttgtaatcccagctactcaggaggctgaggcaggagaatagcttgaacccgggaggcggaggctgcagggagccaagatcgcaccactgcactccagcctacgtgacagagcaagattctgtctcaaaaaaaaaaagaaaaaaaaaaaataagtgactcctggctgcatcccaaccataccccaattccttctaaccacagaattattccatcttctcttccttttttttttttttctttttttttgtttgttttgttgggacagaatttcactttttttttttttaatgtaagttttagggtacatgtgcacaacgtgcaggttagttacatatgtatacatgtgccatgttggtgtgctgcacccactaactcgtcatttaacattaggtatatctcctaatgctatcccttcccccgagtttcacttttgtcacccaggctggaatgcagtggtgcaatcttggctcactgccacctccacctccagggttcaaatgattctcctgcctcagcctcctgaatagctgggattataggcatgcaccaccacgcccggctaatttttgtatttttagtagaaatggggtttcacaatgttggccagactggtcttgaactcctgacctcaggtgatccaccagcctcggcctcccaaagtgctggaattacaggtgtgagtcaccgtacccggccaccatctttgcttctttatccacaccttgccttgttcttcagggctctgcagagatatcatttcctccaagagtttccacaactccgacttcacaaagatagcacttttttttttttttttgagacagtctcactctgtagcccaagctggcgtgcagtggcacaatctcagctcactgcaaccttcgcctctggggctcaagcgattctccttcctcagcctcccaagtagctgggactagaggcgcgcgccaccacacccggttaattttttttgcatctttagtagaggtagggtttcatcatgttgccctgggtggtctcaaactcctgagttcaggtgatccccccgccttggcctctcaaagtgctaggattacaggcgtgagccactgcgcccagccaagacaacactttcctcatcccaaagcacctgttaattccctgtaacagcacttgaaccctgattcggcatgcatgtccattttcctgcctctaccgtgaactcgtgtgaattgatctatgtcagatttagtggctgcattcacagctcccgcaactataacggggttctcgggaaatatatatcaaatgagtgaatgtatatacggggctgtggcacagcctgcaacttgagacttctcactaggggtcttgaaatgctgtctggacaccaccatcgctttcctccctgagaacttctacttatcaacccatttatatactcatcgcatgggtcctcacgccctcccattattctggtgcctcatgccggtcaaatttattctctaaatctgatttttccattaaatagcagcctggccaacacggtaaaaccccatctctactaaaaaatacaaaatattagccaggcgcagtggcttgcacccgtaatctcagctactcgggaggctgaggcagcagaatcacttgaacccgggaggcagaggttgtggtaagccgagattgcaccactgcactccagcctggtaacagagcgagactccctctcaaaataaataaactgctgactcgcgtattttttctttaccccaactcattccttacatgtaggcacctgtaatcctagctactcagaaggctgaggca[137 bp omitted]tctgctttactggttcagtaaaagccaggaaacacaactttgtggtaatctgaatgttattgaactgtattttgttcactttattgtaaatactagtgaacagtgaataaatggttgtatattcctaataagaaaaaaaaaaaaaaagacccaaagtacagcgagctgatgccgatctcatttcgcagaggtccgcctgctctcccctctccaagagtgtaatcctatgcttaataaacttatgccgctttgctatgtgtgtgtatcacacccaattctttgttcgaaacaccaagggcctggaacttcacagctttggctggtaacggggagcaggggtaaagacatttaaaagctgcttgtgttaaccataatcgccatcccatatatcagacccccagaactaactcatcttataactgaatattgtgctttttttttttttttttttttgagacgaagtcctgctctgtcacccaggctggagtgcagtggcgcgatcttgactctgcaacctccgcctcccgggttcaagcgattctcctgcctcagcctcccgagtagctgggactacaagtgcgtgccaccacgcccggctaatttttgtatttttagtagagacggggtttctccatgttggtctcaaactcctggtctcaggtgatccacccgccttggcctcccaaagtgctgggattacagacgtgagccaccacacccagctacttgtgctttttgaccaacatcttcctctcctaccacccccagcccctgataacctccacctactctcacttctaggagatcaactgttctatttttttttttttttttttttttttgagtctcgctctgcacacccaggctggagtgcagtgctgcaatctcggatcactgcaacctccgctttccgggttcaagcgattctcctgcctcagcctccagagtcgctgggattactgagccaccgcgcccagccagaagacccacgctccctaagacataacccacactggtggcctttgttctgacttctcacctgtgctccccacccgctagaaactggcttctctccccacacttcctctgaagctgtctgtgtgaccaacactaatgagcttccttcctggaacatgcagtgacccttttcagcccttctcattattgctcccccacagttgtatttgacacgttgaccacttcctcctcgaaggactcacttctctggctttctcggacacttcttgctactcgttttctgacggttacagtaccaacaggtttgcaggcacctccaccaccagagccaatcccagctactcgggaggctgaggcaggagaatcgttcaaacccgggaggcagaggttgcagtgagtcgagattgcgccactgcactccagcctgagtgacagactgtgactcctcaaaaaaaaacaaaaacaaaaacaaaaaaactacagtcttgctctgtcgcccaggatggaatgcagtggtgccatcttggctcactgcaacctctgcctgctggggtctagcgattctcctgcctcagccccccaaggagctgggactacaggcatgtgccgccacgcctggctaatttttgtatttttagtggagatgggggttttaccatgttagccaggttggtcttgaactcccgacctcatgtgatccgcccaccttggcctcccaaagtgcgaggattacaggcccccgcacccagcctaggatcctgcacctctctagcctagcagttctctgctgggtgattttgctctccactccaggggacatttggcaatgcccatggtaatttttaattgtcatgacttggggaggggttctactggcatctggtaggtagggtccaggggtgctgctcagcttcctacaatgcccagggcagccccagatggcagcagcaccaaggctgagaaacactggctcatgcagaaagcaaccaccttacacccttcagtgcagggacaaaggcagggttacgagtccacggaaactctccagtctcagcctacgtaagacgtggctatttttctttcttattgtttttattcatttatttttcttgagacagagtcttgctctgtcgcccaggctggactgcagtggcgcgatctctgctcactgcaagctccgcctcccggg[135 bp omitted]tctcaaagtgctgggattacaggtgtaagccaccgcacccggccttattcatttattttttgagatagagtctgagccctttattttatttatttagagaccaagtctcgctctgttacccaggctggagtgcagtgtcgtggcctcagctcactgcaacaacctccgcctcccgggttcaagcgattctcccaccttggcctcccaaagtgctggcattacagacacccactaccatgcctggctaattttttgtacttttagtaagtaaagacagggtttcaccatcttggtcaggatggtctcgaactcctggcctcaagtgatcggcccgcctgggtctcccaaagtgatgagattacaggcgtgagcgaccacactggcctaatgtgtagttttttatctgtggcctcccttctgccctcccccttctgagactctgaagcccattacatcactctgcctttgtgtaccaacagcttagctcccactgagaacatacagagccaggcacggtggcggtggctcacgcctgtaatcccatcactttgggggtgctgaggcaggtgtatcgcctgaggccaggagttcaagaccagtctggccaacatggtgaaaccccatctctactaaaaatagaaaaatacatagctgggtgtggtggcacgtgcctataatcccagctactagggaggctgaggttggagaatcgcttgaacccaggaggcggaggttgcggtgagccaagatcacaccattgcactctagcctgggcaacaagagcaaaactgtcttaaaaaaaaaaaaaaaaagtgagaacatatggattctactcctgttagaataatggcctccagctccatccaaattgctggaaatgacattatttcattccttctaatggctgaatagtattccatggtacatagacaccacgttttctttatccactgtagggaccagccccacagggtcggtgggtctctccctgtgtgcggcgacgagagagtgtagaaataaagacacaagacaaagagacaagagaaaaggcagctgggcccgggggaccactaccaccaatgcgcggagaccggtagtggccccgaatgtctggctgcgctgttatttattggatacaaggcagaaggggcagggtaaagagtgtgagtcacctccaatgataggtaaggtcacgtgggtcacgtgtccactggacagggggcccttccctgcctggcagccgaggcagagagggagaggagacagagagaaagacagcttacgccattatttctgcatatcagggactattagtactttccctaatttactactgctatctagaaggcagagccaggtgtacaggatggaacatgaaggcggactaggagcgtgaccaccgaagcacagcatcacagggagacggttaggcctccggataactgcgggcgagcctgactgatgtcaggccctccacaagaggtggaggagcagagtcttctctaaactcccccggggaaagggagacccccccccccacccgctgcccctttcccggtctgctaagtagcgggtgttgttaattgacaccttttgctaccgctggaccatgatccgcttggtgacgggtgtcttcccagacgctggcgtcaccgctagaccaaggagccctctggtggccctgtccgggcataacagaaggctcgcactcttgtcttctggtcacacctcactatgtcccctcagctcctatctctgtatggcctggtttttcctaggctatgattatagagtgaggattattataatattggaataaaaagtaattgctaccggctaatgattaatgatactcatatataatcatatctaagatctatatctggtataacaattcttgttttatattttattatactggaacagctcgtgtcctctgtctcttgcctcggtgcctgggtgccttgccgcccacaatccactcattattcaatgggcacttcggttggttccacatctttgcaattgtgaatggctgagccagccattcttaactgggggtgattttgtccccatgggggtatctggccacatcccgagaggttttttggttgtcacgagttgcagtgggggcaggctcaggctcatccaagtccaggggtgctgctatacatcacgtgatacacaggacagtccttgctacggactgaattggtcccaccaaacgtcatgtacaagccctaccccagatgtgactctatttggacacagggcttttcagaggtaattaaggctggtcaggcgccgtaatcacagcactttaggagttctgtgtttattactggtaagtgggtaagagcccagtgtggcagctcacgcgtgtaatcccagcactttgggaagcgaaggcaaggggataactggaggccagcagttcaagacaagcctggtcaatacagcaagactccatctctataaaatattttaaaattagccaagcatgtttggcatgcacctgtaatcccagctcaggaggctcaggtgggaggattccttgagtttaaggctgcagtgagctaagatcgcaccattgcactccaacccggctgtgggcaacacagcaccaccaccatcttggctgggcacggtggctcacgcctgtcatgccagcactttgggaggccgaggcgggtggctcacctgaggtcaggagtttgagactagcctggccaacatggtgaaatcacgccactgcactccagcctaggcaaccaagtgagactctgtccgccccaccaccccaccaaaaaaaagactactatcttaaacaaaatcaaaatttttaagtagataaaatatttaggggaaaaaaacttcaattaaatatgcagcagagtccgacccagatgttttcactcccagcctctacctactatctttgtgtctttatttttagcaaattctacacgggaacttcatgtgcatgtagaaccctaaatgttgactcagccctacctctcatcacctgaccacttcctttattcacgctgtctctaccacccttcccatcggtgtgagctgtatcccgctaaacactgttaccacccacagcctgcattactaccagctgactgtagccttaaacaccacagtgatctcgagcatttgagaagacttatcttgacaagggctcacgaaagacagcaatgctcaacagcaagataaatgagggccttcatgggatcattcagtgctgaagccactcaacctccaggtttgggttagtaaaaagaactttgtcaggccaggcacagtggctcacgcctgtcatcccagcactttgggaggccaaggcgggcagatcacctgaggtcaggagttcaagaccagcctggctaacatggtgaaacctcgtctttactaaaaatacaaaaattagccaggcatggtgacgcacacctctagtctcagctactccggaggctgggacagaagactcacttgaacccaggaggcagaggttgtagtgagccaagatcgcaccactgcactccagcctgggcgacagaggcaagactccatctcaaaaaaaaaaaaaaaaaaaaaaagaaaagaaaactttgtcatacaagctttcaacctaaagcattagccatatgcccgtgtttttgtgcctgggaccatgacaactttccccatatcaatgctcttattttttttttttcgagacaagagttttgctcttattgcccaggctggagtgcagtggcacaatctcagctcaccgcaaactccgcctcccgggttcaagcgattctcctgcctcagcctcccgagtagctgggattacaggcatacaccaccccacccggctaattttgtatttttagtagagacgg[135 bp omitted]cgcaagcgtggagagccaagtgaggagaggggtcagtcccttttggcagcgcctggaagccagtgctaacatcatggtgacaacttttcattcttaaggaaaattgcggagtgacttctatgcattttctatgaatgaccaaatacagggtgtggaaaagctgtgtttgccatggcaatgggaagccgagagaaacggggaggcgagagagacagagacatacacagagactcccagagacagccacacagactcacacagaaacagacagacaggctgggctcggtggctcacgcctgtaatcccaccactctgggaggctgaggcgggtagatcacctgaggtcaggagtccgagaacagcctggccaacattgtgaaaccccgtctctagtaagaatacaaaaaattagccaggcatggtggcacagggctgtaattccggctactcggaaggctgaggcaggagaatcacttgaacctgggaggcgcggttgcagtgagctgagatcacgccattgcactccagcatgggcgacaagagtgaaactccgtctcaaaaaaaaaaacaaaaaaaaaaaacgaaagaacagagagacacatacaaagacagagatagaaacgcccagcgacagagacacacacagagaaacacagacagacacagagacacacacacagaaacagacacagagacagagagacaaaaagacagacacagagaaacaaagagagacacacagagacagagagagagagagacacatacacacacacacagagagtaggaggcggcccgtgggagccgagcagaaccagcgtgaggcagggccatcttctgaattaaaggcaacagtgactgtaagcttgtgctttgtgagtaacaggatagattagaacagggctggctgcccatggcccacgagctgtttctgggaagcctccgcaggtgccagccaggccctgcgctgcttccatgtccaaaggcacagctgagagctgatgagagaccgcggggcccacagtgccaagcatatgaactatctggcccgtttgtcaatgcgtgggttgatcacataagttatgatcacataagtcacaaagacacactgatcacatagatgcacctggcagatagtagaccacatggcgcctgagttagggaagaaaagaaatagaagaatcaaccgaatcatccctgaacttcttagcaatacttcctcctagacaaagcacagagtaccatgtttattgcaggtttgctcctgagcatgtcaataaacgcagctgcaacgagagtgctctaactttattatccctgtgagaaagtacatagcgtcatgtgaagggggtgcgtgactcgtgcagaatctcccaaaaatagtgagaaaaccagtgtcaaatcctacctctcgacagactctagtgttaacatgtgaccctctgacctgcattcataagacatcttagagacccgaatcccgcttcctgtgtaattcgtagagcgatcccaggctgctcagcaaaaaaagtcacagcacggaggtgccgttgccccggaagcattgcaatcaatagtcagcttgggattcttttctttcacttcctccaacagcttcttgatttccaaattagtttcataggtcttcaacctggagggatcagagaacacaaatgttcccagaaattcattctcaactacccaggatgcctgaatatctgttttcaaacactcaaagcaggaaacgtttttgggattttctgggggacagggtcttgctctgttgcccaggctggggtacagtggtgccatcttggctctctgcaacctccagctcccaagttcaagcaattctcatgcctcaggctcctgagtaactgtgattacaggtgtgcaccaccacgcttggctaagttttgtatttacagtagagatggggtttcgacatgttagccaggctggtctcgaacttctggcctcaagtgatccatccacctcggcctcccaaagccatgggattacagatgtgagccacagcacccagtcagaaaagttttctaaaaagaaatttagacccacacaatggggatccttataagtctaagaaaaaaaagattatggccaggcacggtgtctcgcacctgtagtcccagcactttgggaggccaaggcaggcagattgcttgagctccgcagttcaaggccagcctgggcaacacggtgaaaccctgtctctaccaaaaatagaaaaagttagccaggaatggtggtgcacgcctatagtcccagctactcgggaggcggaggcaagaggatcacttgagcccaggaggcggaggttgcaacgagctagagattgccctactgcactccagcctggtaacagagtaaaacatgcctttaaaaaataaatttaaaaaatagataatcaggctggtgcacggtgactcacgcctataattccagcactttgggaggccgag[132 bp omitted]gagacaggagaatcgctttgaacctgggaggcagatgttgcagtgagccaataccgcaccactgtactgcagcccgggtgacagagcgagactctgcctccaaataaataaataaaaaatagtggcaaatcaaaccttcagtagaactaagagaatgccagagtgaaccccagggttaatgatagcaaacttggctctaacgtggctgcagcatgcaagcctgtgtatgtgaacatgaggggtggtgattgtggagacactggcttgctatgttgcccaggctggtctcaaactcctggcctcaaacaatcctcccaccttggcctcccaaaggaggaactgaggaatgagaaaagaaatacgccccaaacatatgacataagagaccacagggggctagagatttgtcaccaatagtccttggtggcattacagacctcggtcccaccaacaagagaagcatgacactatttagctcaagtttcatgatatacccctaaaaccttaacccatttatgccagaggttacaattatttgaactgcagacgtgtgaaaaatcgtaccttgagcaggatataaataactcccacatgcttagcgttccaataatgcaacactgggcatcatgaagcagtttacatgcgtatcatctctacaactaaaataactcttgaataagacaagtgggctgtgcacagtggctcacgcctgcaatccgggtactttgtgaggccaagacaggaggatcgtttgaagccaggagtttgagaacctcggcaacacggccacacagtgcagcagagcaaaacgttgtctcagaaaagaaaagacaaaggc[144 bp omitted]tgaaaccccatctctactaaaaatacaaaaaattagccgggcgtggtggcgggcgcctgtagtcccagctgctcgggaggctgaggcaggagaatggcgtgaacccgggaggtggagcttgcagtgagccgagatcgcaccgcttcactccagcctgggcgacagagactggagtctctgtctcaaaaaaaagacagattcaaaaaaaaagacagactccgtctcaaaaaaaagactccgtctcaaaaaaaaataaaaaatacaaataagtcattgaaaagatatacacgggtcacaactaagggagcatctgtaggacgatcttctgaaaagctaagacccaggacagctctgggaactacctatttttggatataatgattaggggtgtgtgtgtgtgtgtgtgtgtgctcatgcacacacatacacacaagcttccagtctgtactccaggatgatttaaactctcagtatgcctaggactaagtgttttgggggaaagttggacaatattcaattcacagagcattttagaaaagtatctaatttttaaattatctcctaagctaggagtgtgctatagaaagatgccttaagttgatccctacaaagagtacacacactcccaaaaaaactcttctctgcatgggaaattcaccatgtgaaacagccatcccagggccgagcacagtggctcacgcctgtaatcccggcactttgagaggctgaggcaggtggatcacctgaggttgggagtttgagaccaacctgaccaacatggtgaaaccccatctctactaaaaactacaaaaattggccaggtgcagtggctcatgcctgtaatcccagcactttgggaggccaaggcgagaagatcacctgaggtcaggagctcgagaccagcctggccaacatggcaaaaccccatctctactaaaaatacaaaaattagctgggtgtggtggcgagcgactgtaatcctagctactcaggaggctgaggcaggagaatcacttgaacccaggaggcagaggttgcactgagccgagatagcgccactgcactccagcctgggggacagagagagactctgtctttaaaaaaaaaaaaaaaaaaaaaaaattagccagctgtggtggtgtgtacctgtaatcccagctactcaggaggttgaggcaggaaaatcgcttcaacctgtgagaaggaggctgcagtgagtcaagatcgcgccactgcactccagcctgggcaacagtgagactccatcccaaaaagcaaaaaccaaaaaggccgggtgcaatggctcacctctgtaatcccaccactttgggaggccgaggcaggtggctcacctgaggtcaggagttcaagactagcctggccaacatggtgaaacccctctctactaaaaaattagccaggcatggtggcaggcatctgtaattccagctacttgggaggccaaggtgggagaatcgcttgaacccaggaggtgggggttgcagtgagccaagatcgcaccactgcactccagcctgggctacaagaacaaaactccgtctcaaaaaaaaaaaaagaaaaagaaaaaaattagctggacatgttggcatgcctctaggcccagctactcatgaggctgaggcaggagaattgcttgaacctgagaggcagaggttgcggtgagccaagattgcgccactgcactccagcctgaatgacagagcacgactccatctcaaaaaaacaaaaacaaaaaacaaaacaaaacaaaacaaaaaacccatacctgagtatcttcaaggatccagttctttgtcttagaaccccaaagagcttaattatgccactcttccacaaatgattctggcccaggtccagagtttcaagcttctgattgctgaggagagcagatccaagatgctgacaatagaaaggcatgagggagcagctccagaggctgttgaggaagaacatggaaatccacgcattcactgagcaggtagtggctcaagcgtgtaatcccaacacttcgggaggccaaggcgggtggatcacttgaggccaggtgttcgagaccagccttgccaacacggtcaaaccccatctctactaaaaatacaaagattaggcagggcgtggggacagacacctgtagccccagcaccttgggaggccgaggagggtagatcacctgaggtcaggagttcgagaccagccaggccaacatggcaaaaccccatctctacaaaaaattagccatgcatggtggtgtgtgcctttaatgctagctacttgggaggctgaggcacaagaatcgcttcagcctgggaggcggaggttacagtgagcccagattgcgccactgcactccagcctgggcaatagaatgagactccatctcacaaatatataacataaaatgaaaatacaaaaattagccaggtatggtggaaccacctataattccagctactcgagaggcaggagaatcgcctgaaccaggaggcagaggttgtagttagccaacatatcaccactgcattccagcttgggtgaaagagtgagacttggtctcaaacaaaacaaaacaaaaaaacaagcagcatatttgctggggctccagtagtgaggaaaggcagaggggagtgagcagaagaaatccttgtcctcagagtttttagtgacagcagacatctcgatatgttctattgaagacaatggatgatggtattaaaataaacagggtagaggtaagtcaaacagagaggcattgattggctagacttatgctggtcatttaagtcctcttttggaaagtgatatgaggaaagaaactgaaggatggtagatcatgaaccagcatgctaactgggggagggaatcttgtaaataaaatactgagctagtgagaaagtagaatgatttatggctcataacttacacgaggatcccccataaggccctgtaggccactgtagaagcctttggttttgttttttttaaggcagagtttcactcttgttgccaaggctggagtgcaatggcgtgatctcggctcactgcaacctccgcctcctgggttcaagcgattctcctgccccagcctcccgagaatctaggattacagtcatagctgagattacaggaacaagacaccaggtaatccacccgtttgcattgagcttttgagtctttggaaataaaggtatcacggtctggcttgaggcttgaaatattcctcagggggatgggttaagaaacttcaggaggccaggaatggtggctcatgcctgtaatcccagcactttgggaggttgaggcaggtggatcacttgaggtcaggagtttgagaccagtctggctaacatggtgaaacctggtctctactaaaaatacaaaaattagctgggtatggtggtgcacgcctgtaatcccaactactcagctcaatcaggagaatcgcttgaaccttggaggctgaggttgcagtgagccaagatcgcaccactgcactccagcctgggtgacaaagcgagactctgtctgaaaaaagaaaaaaagtaccctgtgttctagtgttttttttctttactctacagcaaagctaagtagtaatgacgtgcagattctctttgcattaggattgcagattctagttggaaaataggttgcatccaagagatgcaactgacaaactttggggagagaagtgatgaagagctcgccattccatttgtggagactttgcattttctgggggtggtatcccacctatggttccctgggtttatgaggtggggcaggctcactgcttcctgattactggatcccagcagaagcagcatgctgctgaagtccaggtcactgggggccattgttatatatatttcacttctccaggccctctacctgactttagaagtgcccacccacatatattcagtttctggaggggtttgatcttaaaactggat[185 bp omitted]ggtggcgggcatctgtagtcccagctactcaggaggctgaggcaggagaatagcgagaacccgggaggaagaggttgcagtaagccgagatcgcgccactgcactccagcctgggcaactagaacgaggctccgtctcaaaaaaaaaaaaaaaaaaagaaaacatagaaattaaggatttccagatttccaaacactttaaaaatgaggccaggcatgatggctcatgcctgtaatcctagcacattgggaggccgaggtgggaggattccttgagcaccagaattcaaaaccagcccgggaaagatgacaagacctcatctctacagaaaacagttacctggccatggtaatacatgcctgtagagccagctactcaggaggctgaggtgggagaaccgatcaagcctggaagaccgaagccgcagtgagccgtaatcaccccactgcactccaggctgggggacagagcaagaccctgtctcaaaaaaagaaagaaagaagaaaaagaaaatcgcctaccgtaggtgttttaggttacagtttggattctctaatgcctgacagagaatccacaatccacgagctatctggttgatactcaagtccaggtttgtgaggctgcaggcttcttggagcgcctctgagagatatctacagccaagcttggttatgctgcattgctgtaacctacaggataatcaaaggaagagaagcctgttatccctctggctaacgccctgtgaagcagttatttccaacactatataccttccacttatatactggaatgcagtgctgcactcttggctcactgcaacctctgcctcccaggttcaagcgattcttctgcctcagcctcccaagtagctgggattataggtgcccgccacctatataaccagacttggtggtgcacgcctgtagtgccagctactcagaagactgaggcaggagaatcgcttgaatccgggaggcagaggctgcagtgagctgagatcgcgccactgcactccagcccgggcgacagagcgagactccgtctcaagaaaacaacaacaacaacaaaaagtatttatataaaacataggtggcaggtaggaattgacccatgaactggagctatatacttccaggtgggcttgcacataaaagcatgcaaatgggccgggcacagtggctcacgcctataatcacagcagtgggaggccaagacgggcagatcatttgaggtcaggagttcaagaccagcctggccaacatggtgaaaccccatctctactaaaaaatacaaaaatcgggccgggcgcggtggctcaaacctgtaatctcagcactttgggagaccaaggtgggtgaatcacaagatcaggagttcaagaccagcctggccaaagtggtgaaaccccatctttactaaatacaaaaattagctgggcacgatggctcacacctgtaatctcagcactttgggaggctgaggcagacagatcacctgaggtcgggagttcaagaccagcctaagcaatatggagaaacccgtctctactaaaaatacaaaattagccaggtgtggtggcacatgcctgtaatcccagctactcaggaggctgaggcaggagaatctcttgaactggggagacggaggttgtggtgagcagagattgcaccattgcactccagcctgggcaagagcgaaactccatctcaaaaaaaaaaaaaaattagccaggtgtggcggcccatgcctgtaatcctagctactcaggaggctgaggtaggagaattacttgaacccaggaagcggaggttgcagtgagccaagatcgcaccactgcactccagcctggtgacagagagagactgttaaaaaaaaaaaaaaaacatccaaatggccttctgattccatccatttccagctctgcctgggacaacagcttaggctctgggttcagaccgacccaggacaggatctgagccctgggtcacttattttctgcgtggttagattatggaaatttcactttccctgtcattttatttcatgtttaagttttgtctttaactgacacattctacatatataggggtatagtgtgatgttttggtgcaggtacacttcgtataacgatcaggtaggtgactgtttgtttaacaatagttattctaagccaggcacagtggctcatgcctggaacgccagcactttgggaggccgaggcaggcagatcacttaaggccaggagttcaagaccagcctggccaacatggtgaaacctcatctccactaaaagtgcaaaaattagccaggcatggtggagggcacctgtaatcccagctacttgggaggctgaggcaggagaatcgcttgaacctgggaggcagaagttgcagtcagccaagattacaccactgcattccagtctgggcgacagagtgagacttcatccaaaaaaaaaaaaatgaatctcagaaatgaccactagctagaatttctgaacaggaacaggtcttcaaccctatgcaatctcttgaatatttttctaaccataattttaatgtgaacaggtagctcacgctgggcttctttccatataacaagattcagccaactatagttcgtgggtcaattccaacctgccacctatgtcttttacaaataaggatttttgttgagtttttttttgtttttttcttgagacggagtctcactctgtcgcccgggctggagtgcagtggcgccatctcagctcactgcagcctctgcctcccagattcaagcgattctcctacctcagccttctgagtagctggtactataggcacgcaccaccaagcctggttaatttttgtattttttagtagcgatgggttttcaccatgttggccaggctggtctcgaaccttaggtgatctgcccaccattcaccacctgttccccaataacctatggaaataaaagtttaaaaaaaggtgccactggccctaccacataactcaatctacctccaatagcaggcagtactatgtcataggaatttgaaagaacacacacaaagcatcagatccgagaaccaactactcatctcaaatcttccttcatagcaggaagaggctctgctgacatgcaaatattaacatgtttctacctgtatctgcctggttttttttgtttctttgtttttttgagaaggagtcttgttctgtcgcccaggctggagtgcagtggtgcgatctcggctcactgcaacctccgccttccaggttcacgccattctcctgtctcatcctcccaagtagctgggactacaggcatccgccaccacacctggctaatttttggtatttttagtac[143 bp omitted]ttaaaagttacatttgaaatgaattaacaagtactttcatgtctctcctgcttgaattcatgtgcacacacacacacacccagcagggacttacaccaaggtctgcagtttacaatcagggtaactcaagccctcacacagaaacttcacccctgtatccccaatggggttcttggccaagcacaggtgtgtcagcttcttgctgacaaccaagacagcagcaaggtccttgcaactggcttctgtaagacgacagttttccaacctgcaaaaatatgaaacaaatggtagaaggatgagaacatttccacaactccaacctgctcagtgatgtccacatgctagggtactcagcttcagcccttcctgttcatcccctgccctctgtcctgtgggagtcatcatggccacaaaagagcaggaaggcgagaaggccaagatg[144 bp omitted]agcctcctgagtagctgggactacaggcgcccaccacacctggataattttttgtattttttagtagagacggggtttcaccatgttagccaggatggtctcgatctcttgacctcgtgatctccccgccttggcctcccaacgtgctgggattacaggcatgagccaccgcacccggcctgtttttggtatttttaatagaaacagggtttcaccatgttggccaggttggtctcgaactcctgaactcagatgatccgcccacctctctgctgagattacaggcaggagccaccgtgccgggcctgaagcaggtgtttatttcagcaagaggcgccacgtgggtggcgcagtaagtcaggtgttaccctttctcttctatagccccagaactaaaccagagctgcccatgggaagaggagacttacgacaacatctgcaggaagtgttttgggcgtgtcatggtcttgtacagcaacatggcaccctcatccaggagcacattggctgagagacgcaggtgcttcagggactggttggctttgaggacatagaagaattcagcccactgctccggggtggcacagtgacctcccaacctgtgaaaagagtgggaaaagtcattcttctgggaggacagagtataccctatcagctttttttttttgagacagagtttcactctgttgcccagtctggaatgcaaaggcgtgatctcacctcactgcagcctccgcctcccgggttcaagctattctcctgcctcagcctccgaagtagctgggattacaggcattcgccaatttttgtatttttagtagagacgggatttcaccatgttggccacactggtcttgaactcctgacctcaggtgatccacccaccttggcctaccgaagtactgggattacaggtgtgagccaccgcgcctggcccagatcagcttcttctgcttcacttcccaagacattatgtctttggtttatctcattctactcatgcctccaaccctggcctgaattactggagagatctaatgttgcctctgcttcttcaagtatccccatggccattagggtaacatccagccacttctccaagagattgtaatacaattctgtgcaatgtttcaccaaaacggcctgtgtggatgattttgcaggggggaaaaaaaaattttttttttgagacaggatctcgctctgttgcccaggctggagtgcagtggcatgatcacaggtcaccacaacctgtctcctgggctcaaatgatcctcccacctcagcatccactgtagctgggactagaaggggcaaattgatgcttaatactcaaaataaaaattttatcctggccaggcgcagtggttcatgcctgtaatcctagcactttgggaggccgagacaggcggatcacttgaggtcaggagttcgagaccagcctggccaacatggtgaaaccctgtctctattaaaaatacaaacatttgccaggcgtggtggtgcacgcctgtaaccccagctactcgggaagctgaggcagaactgcttgaacccaggaggcggaggttgcagtgaacgagatcgcgccactgcgctccagcctgggtgacaagaataaaactgtctcaaagaaaaaaaaaaaaaaaaaagattctcattgagtgcagagaaggttgcatgctccttatgaatacctaactcctgatgatctgagattgatgatccattctcctcaggctcccaaagtgcgaggatcatgcactccataggatcaggcaccaacgattagctcctgtgcctgatctgagatcgaacagtttcatcccaaaactacccccaaacccgtctgtggaaaaaactgtcttgtgcaaaaccggcccgcggtgcagaaaaggctgggggccactgctctcaatcccaacaattaggcaaggtgcagtcaggaatagcatgtccctaaagctggaacccagcacagaattcggggtgtttctttgcatggatagctggttatgcaacacagaagacaagctggtgggggaaagaggagaggccgactcccccacacaggcctgtttgaggaatacattccctgtctgggacggcatctggagtggttaccctttttcctagatcccccagcaacacggtgcagtggactccaggtgctggggagagccgtgaccgtgagacccacctcaggtactgcaggttgcatttatgatttctgagcaggtcacacagcatcagcatcatcgtgcgttcccactcgatgtgccctgccagggtcaggtgcgtgagggtcttcttcccaatgaaagcaagacagaagtcccggtacgcggtgtcaggggtgacgtttttaatcctagggaaaagcagaagagattccacttggagtgattaatactcacattgtgtggaggcatgtataaacaaaaagctgtttcacatttagaaattattagaagttcttggccgggtgcagtggctcgtgtctgtaaccccagcactttgggaggctgaggcaggaggataacctgaggtcaggagtctgagaccaacctgggcaacatggtgaaactccatctctacaaaaaataaattagctggggccgaggcaggcagatcgcctgaggtcaggagttcgagaccagcctggccaacatggggaagccccgtctctactaaaaatacaaaaattagctgcacatggaggggcatgcttgtagtcccaggtattcgggaggctgaggtaggagaatcacttgaatccaggaggcagaggttgcagtgagccgagaccgcaccactgcactccagcctg[174 bp omitted]aaaactagccgggcgtggtggcgggcgcctgtagtcccagctactcgggaggctgaggcaggagaatggcatgaacccgggaggcagggcttgcagtgagccgagattgctgcactgcactccagcctggggaacatagcgagactgtctcaaaaaaaaaaaaaaaagtcaagaagcagaggatcaggaaaaacaactaaggggtactaggcttaatacttgggtgacaaaataatctgtacaacaaactcctatgacacacggttacctgtgtaactaacctgtacttgtacctactttttggtttgttttggtaacaaaacaaaccaaaaaaaagatagctggggccaggcatggtggctcatgcctgtaatcccagcactttcgaagaccgaggcaggcgcatcaccttaggtcaggagttcgagacaagcctggccaagatggagaaaattccacctctactaaaaacacaagattaagtcattgcactccagcgcctaggtgacagagtgaaactctgtctcagaaaaaataaaaaataaaaaaggggccaggtgcagcggctcatgcctataatcccagcactttggaaggccgaggcaggcaaatcacctgaggtcaggagctcgagatcagcctgggcaacacggtgaaaacctgtctgtgctaaaagtacaaaattagccgggcaaggtggcacatgcctgtaatcccagctactcgggaggctgaggcaggagaattgcttgaacctgggaggtggaggatgcagtgagctgagatcgcgccattgcactccagcctgggcaacaagagtaaatctccgtctcaccaaaaaaaaaaaaaaaaaaaaagacagctggaaaatccccaaatacatggagatgaaacagcacatttccaaatttaaaaaacaaaagtacaagaagcttagtcatcgttcagggtcttccttgcaagatgagcttctacttactccactttctgcagatgacaggtgctacgggttacgtggtcacaaagaatccgcacagaagagtcactcaggaagctttgtttcacttccagaaacttgaggttgctgtttgagctgaagagagagcagaaatctgtccagaggcgaagagagcgaagatcctgccgagcccagttcggaatggttaggtaagtgcacctgcaggagaacacacgttcatctcttaggactagtacctgcatggtgagatgggcatctgcaaaccacatttcaatggcaaaaaccacaattacttttgcaccaacctaaaacagtgtctatagtaaacaatattgcatcacatgctttgctaccagtatagatcttaagttttacaaaaaaaataaaataatagataaggctgagtgaggtggctcatgcctgtaatcccaacactttgctaggccaaagtgggaagatcacttgagcccaggagtttaagaccaacttgggctagaaactgagacccccatctctacaaaaaaataaaataattaaccgggcaaggtggtgcacgcccatagtcccagctactcgggaggctgaggcaggagaatcacttgaacccgggaggcggaggttgcagtgagccaagatcgcgccactgcactccagcctgggggacagagcgagactccgtctcaaaaataaaaagccccaattcctaattgccaagtcgtgtctccacgttgaacatgaagctggaaagaagtccagccagagggaaattctgacagtaagcgacagggcaaaggagacgctggcctcttcctagtggagcgtgggatgggaaaacagttcttacctttcaaattcaatgtccagttcaaaatccatgtaattctccaggaacaccccctttgctacctgcagtgagagtttctgcaagtcttgacaatgcttcaggctgaaggaacaatgcatcacttcagaagtatttgtcaggtgaatagaaatttccttgaacggggccaccaccaccttcgccagctcctcctcctgagactcatacaggcagcccaagacctccttcaggtcggtcacggataagggcttatttgcatgaagatgtgctttgcattgcagcaattcctgtttgatgtccggtgacatccggcagccaaaagtggcctccaactccttggctctcttctcgttagcgaggccgaataagaagtgtcctacttgaatcaggtcggggttcttgagtctttcttctccggaaagcagcttctgtacgtccccgatgtcccaggcgtggccgtccctgtcctccccctcctccttctccagggcgtagaacagggcagtgagaaactgctggaagctgaggtggatgaaggagtagcagcctttggagactctgtcctggcggaggatgtctccgtccaggaacagacggaggtcggactcctgcaccccgagcctttccaggtcctctcggtggaacacggacatctgcgcccacaggccctgcgcggccaggaggctcagcgtccgcagcgcgccccgcagctgtgcgccctgcgggaaccggctgcagaggaaacgcaggaacagccccgtgcgggtgaggcaggtggggaccgggtcctcccccttctccatctgcagcttcagagtcgtgcacacaatccagcacaccgcgggggccgagcccagctggaacagggccgcgttgctcctcattagctcaaaggcacgcatggcttggtcctcgtctccaaagtgtctcaggaaataggccctcctgtcctcctccaggaagccctccacccttacgtagatcggctgctgcgccaggagctggaggtccctcagtgccctgggccgcgtggtgaccagcaaggctgccctgggtaacatcttcctcttcagcaaactccccaggaggacgggcaccggcttcttcttctcccagtccccgcagatgtcctggatcagcgccccaggtgggactttcagctcatcaaggccatcgaccacgaacaggattctctgtgcttgggctaggatgcttggaatgtcatcctgcaattcaggccagtctttggagatcagctctgcaaaactgcaggggcccatgcggctgagctccttgcagctgaggtagaacgcgtatctgagcgtcgggctgaggttgcagtctgtccagtccagcatacactttttggccagcgtggttttccccacgcctgcggggccgtgcagcaccaccgtgtaaggtgttagcttcctgggtgttctgggattcaagaatggaatgaaccgttggtttctcagagtgacgtcgtcatggaaattgtcaatgtctccttgccaaaaggtgttcttccagaccaaagactgtttctccattgaatttctccatccttccttttcacctgcagtgacagcccataggacagttgaggttgatgatgatgattttctgaattattttgtcaagtaccagaaatgagggccaggcacggtgtctcatgcttgtaatcccggcactttgggaggccaaggtgggtggatcacttgaggtcaggagttcaagaccagcctggccaagatagtgaaaccccatctctactaaaaatacaaaacattagctgggggtagtggcggccgcctgtaatcccggctactcaggaggctgaggcagagaattgcttgaacccgggaggcagaggttgcaatgagcagagacggagccactacactccagcctgggctacagagcaagattccgtctcaaaaaaaaaaaaaactaccagaaatgaataaaaccaggaagaagtgatgcaccttgcatgctctcaaacaccaaactcatgaccataggaccgtatttacccacctggctttgctaactccgagtcttcttctgcatctcccagctcaggattatctatttcttgcacctgtccgtcctctgtaaaatacttagatgtaagcctgacacagtaatttacacttcgtaaatcagacattattgtacataaagtgtcagccaggcatggtggctcatgcctgtaatcacagcactttggaaggctgaggtgggcggatcacaaggtcaggagatcaagaccagcctggccaacatggcaaaaccccatctctactaaaaatacaaaaaaaaaaaaattagccaggtgtggtgaaacacgcctgtaatcccagctactccggaggctgagataggagaatcacttgaacccagaggcggaggttgcagtgagcccagatctcgccactgcactccagccttacactccagcctgggcgacagaacgagactccatctcaaaaaaaaaaaaaaaaaaaaaaaaatgaccaggacaccccaggttctacttacccatcatctcagcctttgccatcttacacaattccgtgagattcatctcttccaagatgttcacagtcgcattccttatccaattttctgaggaggtgttgaccagaatttctgccagtttcttgccatcagcctcttccacctcagaccatggggtcttctgtagcacgtcttcgaggggaaaagcccataaaagggatttgaaactctttaattcatcctcgttcagctgctccagaagggtctgcagagtccactctagctggggcgatgtcatagtgctccgagtatgagaccttaggttaaggctgaagaactggggggaaaaaaggaaaaacagttcacgagttaccatcattaaatgaaaccacagtttcctgtgtgccaagaacaagactgttcctgctgtacagtgagtggtaaaatattccaaagactgaattaagagactgaaaatctggcccagcacggtggctcacgcctgcggccaggagtt[146 bp omitted]cccctgcctctactaaaaaaatacaaaaaattagcagggcgtggtggcgggcacctgtagtcccagctactcgggaggctgaggcaggaga[132 bp omitted]gtcagtggtatgctagggccagcccgtgctgcctaatgggggcttcctatatgtacctataccaacgtccatgggctgtgatttcacactgatagtacaa[140 bp omitted]acggcgaaaccccatctctactaaaaatacagaaattacaggcgggtgcctgtaatcccagctactcaggaggccgagacaggagaatcacacttgaacctgggaggtggaggttgcatgatctgagatcacgccattgcactcgagcctcggcaacaagaacaagactctgtctcaaacaaacaaaaaaacaaatcagcaaacactacaaaccaagacttcctcgccaccaaccctcagagccacttgtttaacatttcagcccaccactgaatgacacattgaaaacaaatagcaagaggacagatataaatataactgtactggccgggtatggtggctcaggcctggaatcccagcactttgggaggctgaggcaggtggatcgcctgatgtcaggagtttgagacccgcctggcccacatggtgaaaccccatctctactaaaaatacaaaagctagccaagtgtagtggtaggaacctgtaatcccaggtacgtgggaggctgaggcaggagaatcgcttgaacccaggaggcggaggttgcagtgagctgagatagcgccattgtactccagcctgggcaacaagagcgaaactctatctcaaaaaaaaaaaacttagccaggcctggtggaacatacccgtagtcccagatacttgggaggctgacacaggaggattgtttgagcctacgatttggaggttgcagtgagccagccactgcacgccag[224 bp omitted]gctgaggcaggagaa[131 bp omitted]agaaaaagtgacttgccaagcccgggtgctgatagaggtggacagctttacccttggagggaacagcaaatctttttccccagctgtgacgtgtggggaaaaggaggacagatcagactgttactgtgtctatgtagaaagaaatagacataagagactccattttgttctgtactaagaaaaattcttctgccttgagatgctgttaacctgtaaccctagccccaaccctgtgctcccagaaacatgtgctgtgtcacacgtgggtttagggctatgcaggatgtgctttgttaaacagatgcttgaaggcagcatgcttgttaaaagtcatcaccactctctaatctcaagcacccagggacacaatacactgcggaaggctgcagggacctctgcctagaaaagccaggtattgtccaaagtttctccccatgtgatagcctgagataaggcctcgtgggaagggaaagaccagaccgtaccccagcccgacacccgtaaagggtctgtgctgaagaggattagtataagaggaaggcctttttgcagttaagaggaaggtatctgtctcctgctcgtccctgggcaatggaatgtctcggtgtaaaacccgatggtatgttccatccaccgagataggggaaaaccgccttagggctggaggtgacacatgctggcagcaatactgctctttaatgcaccagatatgtttatgtatgagcacatcaaggcacagcacatttcctaaccttgtttatgacacagacatttgctcacatgttttcctgctgaccctctccccactgttaccctattgtcctgccacatccccgtctccgagatggtagagataatgaccaataaatactgaaggaactcagagacccggccggcgcgggtctcctgagcccacttttctttctgtgtactttgtctctgtgtctctttcttttctcagtctctcgtcccacctgacaagaaacacccacaggtgtggaggggcaggccaccccttcagtgaggtataattacatatatcctattttaggatggagcaggaagagcatgagagcccaggagttccagaccagcctgggcgacacaaggagaccttgtctctattttttaagtatttttaaagtaatatatacaacgtttacttgtcaaagtgtacagcatggagcgatgttatatatacagtgaaatgattaccacaatccagctaattaacatatccactgcttcatatagttgcctttcgtttttgcagtgacaacgcttgatgtacttagaaaaattcagggttttttggccaggcacggtggctcacgcctgtaatcccagcactatgggaggcc[136 bp omitted]c[131 bp omitted]cagggttttttttttctttttcagaaagtcttgctctgtcgcccaggctggagtgcaatggtgcgaggcttaccacaacctcctcttcccgggttcaagcgattctcctgcctcggcctcccaagtagctgggattacaggtatgccccaccacacctaattttttttgtatttttagtacaaacggggtttcaccatgttggccaggctggtcttgaactcctgacctcaggtgatctgcccacctcagcctcccaaagtgctgggattacaggtatgagccaccaggcctggccaagtattttttttcccaagtacatttttttctttttttcttttttttgagatggagtctccctctgttgcccaggctggagtgcagtggcacaatctcgactcactgcaacctccacctcccaggttcaagtgattctagtgcctcagcctctcaagaagctgggattacaggcgcaccgcatcacgccgggctagtttttgtattttta[145 bp omitted]gactacaggcgcccgccactatgcccagctaattttttttgtatttttagtagagatggggtttcaccgtgttagccaggatggtctcgatcttctgacctcgtgatccgcccgcctcggcctcccatagtgctgggattacaggcgtgagccaccgcgcccggccgag[136 bp omitted]atgcagcatttcactctggttgcccaggctggagtgcagtggcgcaatctcagctcaccgcaacctccgcctcccgggttcaagtgattctcctgcctcagcctcccgagtagctgggattacaggcatgtgccaccacgcccagctaattttgtatttttagtagagatggggt[132 bp omitted]ctggagtgcagtggctcaatcacacctcattgcagcccccacctcctggctcaggtgatcctcccacctcaccccacaagtagcttggacacagcacaaggtctggccttctttgttttttgagacggagtcgcactctgtctcccaggctggagtgcagtggcgcgatctcagctcattgcaacctccccctcctaggtttaagctattctcctgcctcaaccttccaagtaactgggattacaggcatgcaccaccacacctggctaatttttgtgtttttagtagagacagggtttcaccattttgggcaggctggtctcaaacttctggcctcaagtgatccacccgcctcggcctcccaaagtgttgggataacaggcatgaaccactgtgcctggccttatatttttttgtaatgacagagttttaccatgttgcccaggctagtctcaatctcctgaactcctctaaactatatttgaatagaagtccttaagacattaggccaggcgtggtggctcacacctggaatcccagcactttgggaggccgaggcagacagattacctaaagtcaggagttcaagaccagcctggccaacatggtgagaccccgtctctactaaaaatacaaaaattagctgggcatggtggcacgtgcctgtagtcccagctactcaggaggctgaggcaggagaatggcgggtgaacccaggaggcggagtttgcagcgaaccaagatcacgccactgcactccagcctgggcgacagagggagactccgtctcaaaaaaaaaaaaatcaaagatccttccagcatcctcgcaccaaccattaaggcttgggaagggctatggtggaaactcaaccaatagcttcttctcccttaaacgagaagacaaagaaatcgatgcaagaaccagcactcacctccctcaggtcaggtcttgcttccagcctgtgtttcctgcaaaggaaacggataaaaaggggaggtctctggcccttggtacgctaggtggagagacagctttcccgcccagggtggaaccgccccactgagattaacattgggtggctcccaaccactgacctcaggctcaccttgacatcacctgggccccatcctcagggatttggctgtaattgggcttcagtgggctttggagaattacggcttgctgaatctccccaggtgagattaatgtgcaattcccttcctagaccacccgggccaggtgtgataggcgacagaacaggaaatacacattttgggttttgcagggtacctggctcccagctttaaaaactcttgtagagaaaaaaaattaaacaaaaataaataaaaattaaaaaaaaagaggacaaaaactcccgtgacttcctaagttacaaatacaataagtctactttgtggccaactgtggtgcctcctgcctataaatcccagcaggctgagaggcctaggccagtggatccctaggggccaggagtttgataccagcctaggcaacatagcaagatgccatctcttcaaaaatatttaataattagccatgcataggctgggcgtggtagctcatgcctgtagtcccagcaatttgggaagccgaggcgggtggatcacctgaggtcaggagttggagaccagactggccaacgtggtgaaactctgtctctactaaacatacaaaaaattagccaggtgtggtggcaggtgcctgtaatcccagctactcgggaggctgagacaggacaatcacttgaactagggaggtggagggtgagtgaggcacgatcacgccattgcactccagcctgggtgacaagagcaagactgtctcaaaaacaaaaacaaaaaaattagccatacatgatgggctgcacctgtaatcccagctattcaggaggctgaggtgggaggatcacctgagctcaggagtttgaggctgcagtgagctgtgactggccatctcactccagcctaggccacagagtgagacccagtctcaaaaaaataaatagataactgatatttaatttttttttttggatggagtcttgctctgtggcccaggctggagtgcagtggtgcaatctccattcttgcaacctctgccttccaggttcaagcaattctgatgcctcagcttcccaagtagctgggactgcaggcacatgccaccatgcccaactaattttttgtatttttagtagagacagggtttcaccatattggtcaggctggtctcaaactcctgatgtcaggtgattacaggcatgagccaccgcacctggcctaaaattgtttttaaataaaacagtgtatgttgtggaaagcattcagcacagaattttggtagtttaaactgttaatttaatggaagcaaatggtcccacaaatgaagatgtatatatcagttgcagcatgccatctatagaaataggcactatggaggcctggcatggtggctcacacctgtaatccctgcactttggaaggctgaggcaggtggatcatctgaggtcagcagttcgagaccaacctgggcaacatggcaaaaaacccctggctactaaaaataaagaattagccaggcatggtggtgtgcacctgtaatcccagctactcaggaggctgaggcgtaagaattgattgaacctgggagttggaggttgccgtgagccgagattgcaccactgcgctccagcctgggcgacagagactccatctttaaaaaaaaaaaaaaaagatggccaggcgcagtggttcatgaatgtaatcccagcactttgggaggctgaggcgggaggactgcctgagtccaggagttcaagaccagcctgggcaatatggcgagactccctctctgaagaaaaagaaaataaaaacaataaaaataaattatattctagctgacaaaaagagagagagagtatattttgttaaaacatttggcctttagtcctagagcagctatggagagataaacatgaaagaggtatctcttgttatacatacccaggccctgcaaccacacctgagtttatgtaaatgaggtgacttttggaaagcccctagataaccccacaagtgcgagggactggctgccaaagaaaccgtcagtgattagacattgggaactttcagccccaggctccaagtggcctccagggaggggagaggggctgaaggttgaattgattatgaactgccagctatgtgatcagcattgcccacctaaggaatcctccataaaccccaaaagaaaagggtttgggccgggtgtcctgtggctcatgcccgtaatcccaacgctttgggaggcctagatgggaggattgcttgagcccaagaattctaggccagtctggacaaaatagcaagaccctggctctacaaaaaataaaaaattagccaggcgtggtggagtgcacctgtagacccagctactcaggaggctgaggcatgagaatcacttgaacgcaggagacagaggctgcagtgagctgagatagcgccactgcactccagcctgggtgacggagttagactgtctcaaaaaaaaaaaaaaccaggaaagagttcagaagagcttcctggttggtgaacccgggtgcattcgtgtgccaggactgtggtgcaccccaggtccacagggacagaagctcctgcacttcggactcctctaaacctccccctacgcatctcttccttggctgttcatttgtatcctttaaaatatgaaagggcgggttgcccctccacacctgtgggcatttctcgttaggtggaaggagagacttggaaaagaaagagacacagacaaagtatagagaaagaaataaggggacccaggggaccagcattcagcatatggaggatcccgccagcttctgagttcccttagtatttattgatcattttggggtgtttctcagagagggggatgtggcagggtcataggataatagtggagggaaggtcagcagataaacacgttaacaaaggtctctgcatcatagacaaggtaaagaactaagtgctgtgctttagatatgcatacacataaacatctcaatgccttacggagcagtattgctgcccgcatgtcccacctccagccctaaggcggttttcccctatctcagtatatggaatatacaatcggggtttacacccatacattccattgcccagggacgagcaggagacagatgccttcctcttgtctcaactgcaaagaggtgttccttcctcttttactaatccgcctcagcacagaccctttactggtgtcgggctgagggacggtcaggtctttcccttcccatgagaccatatttcaggctatcacatggggagaaaccctggacaatacctggctttcctaggcagaggtccctgcggccttccgcagtgtttgtgtccctgggtacttgagattagggagtggtgatgactcttaaggagcatgctgccttcaagcatttgtttaacaaagcacatcttgcacagcccttaatccatttaaccctgagtggacacagcacatgtttcagagagcacagggttgggggtaaggtcatagattaacagcatctcaaggcagaagaatttgtcttagtacagaacaaaatgaagtctcctgtgtctacttctttctacacagacacagttacaatctgatctctctttcttttccccacaaaaatatcctttgtagaccaggcacagtggctcaggcctgtaatcccagcactttgggaggctgaggcagatggatcacttaaggtcaggagtttgagaccagcccagccagcatggtgaaactgcgtctctacaaaaatacaaaaattagcggggcatggtagttcaacgcctgtaatcccagctactcgagaggctgaggcagaattgtttgaacccgggaggcagaggcagaggttgcagtgagccgaggtcgcacgactgcactccagcctgggtgcaacagagtgagactccatctcaaaaaacaaaaaacaaaaacaaaaacaaaacaaaaaatgaaaacccacttttagtaaaaaaaataaaaatgaaaaaatgtgaatcaggctgcactctggcccacatcctggctgctgtgtatcacgtggctctagacactgcacttttgcctcctcatcattgctgtagataggatttctgacagcagggtcattagacgaatttttttttttttttgagacggagtctcgctctgtcgcccaggctggagggcagtggcgcaatctctgctcactgcaagctccgcctcccgggttcacacaattctcctgcctcagcctcccgaatagctgggactacaggtgcctgcaacca[187 bp omitted]tctgggacattagaattataaggcttttgtttaaggatggtttcagatgtttttcagaccttgaattccagccaaatagctgacactaaccagtttgaagaccccagtgaggaatgggatcagcatgagaacactgcgtcttcatgcccctgtctccgccagcagtcagcatggccacactctggcccacaccaaaacacttaaaaaccctagccccggccgggtgcagaggctcacacctgtaactccagcactttgggaggccaaggcaggtgaatcacctgaggtcaagagttcaagaccagcctggccaacatagtgaaaccccgtttctactaaaaacacaaaaaattagtcgggcgtggtagcgggtgcctgtaaccccagctactcaggaggctgaggcaagagaattacttgaacctgggaggcggaggttgcagtgagcaaagatcctgccactgcactccagcctgggtgacaaagcaaaactccatctcaaaaaaaaaaaaaaccctagacccaaacttctgggggagatggattggaggtttcctcccatctcctcattcctcagccctgtgattaaacttccttctcttctgcaacacagtgacccggcaaattgactcacagcgtgcattgggcaacggacctactgtcagaggcgtgtaaccagggcaactccatcttgaataggagctgactaaaataaggctgagacctaccgggctgcattcc[132 bp omitted]ctctactgaaaatacaaaaattagtcaggcgtggtggctcgtgcctgtaatcccacctacttgcgaggctgaggcaggagaatcgcttgagccggggaggcggaggttgcagtaaaaagaaaaaaaaaagcattctaagtcacaggatgagataagtcagcacaagatacaggtcataaggaccttgctgataacacaggtagcaatgtagcaggaccagccacagacaaaactcctcagacaccgagttaaagaagaaaggggtttatccggccaggggcatcggcaagactcccgtctcaagagccgagatccccaagtgagcaattcctgtcccttttaagggctcacaactctaagggggtgtgcgtgagagggtcgtgatcgactgagcaagcagggggtacgtgactgggggctgcatgcactggtaatcagatccaaacaaaacaggatagggattttcacagtgcttttctatacaatgtctgtaatctatagataaccgattaggtcaggggtcaatctttaactaccaggcccagggtgtggcgccgggctgtctgcttgtggatttcattcctgggccgcggggctgtctgcttgtggatttcattcctggggcgcggggctgtctgcttgtggatttcatttctgccttttagtttttactttttctttctttggaggtggaaattgggcataagacaatatgaggggtggtctcctcccttagcaataaagaatccagccaggccgggcgcggtggctcacacctgtaatcccagcactttcgggggctgaggcgggtggatcacacggtcaggagattgagaccatcctggctaacacggtgaaaccatctctactaaaaaa[142 bp omitted]tgacagagcgagactccgtctcaaaaaaataaaaaataaataaaaataaataaagcatccagtcaaactccatcaaaaccaagatagtgacgagagtaacctctggttgtcctcaccgctccactcccagcagccccatgacagtttacaaatgccatggcaatgtcaggaagttaccctatgctgtctaaaaaggggaggcatgaataatccaccccttgtttag[147 bp omitted]ctactaaaaaaaaatacaactaattagctgggtgcggtggcgggcgcctgtagtcccagctactcgggaggctgaggcaggagaatggcctgaacccaggaggcggagcttgcagtgagccgagatagtgccactgcactctggcctggtgaaagagcgagactccgtctcaaaaaaaaaaaaaaaaaaaaaaaagggcaaccgaggccggacgtggtggcttacgcctgtaatcccaacactttgggaggccgaggcgggcatatcacctgagctcaggaggtcaagatcagcctggccaacatggtgaaaccccatctcttactaaaaatacaaaaattagccagacgtgatggcaggcacctgtaatcccagctactcaggaggctgaggcaggagaatcacttgaactgaagtgattcaaggcagaggtttcagtgagccaagatcacgccactgcactccagcctgggcgacaagagcaaaactccatctcaaaaaaaataagggcaactagcagccctatgggctgctgtctatggagtagctattcttttactccttcactttcctaataagcttgcttccactttactccatagtctcgccctgaattctttctggtatgagattcaagaacccaccatgcccagctcgtccttacttgcttttaaaaaatatcattggtggccgggcgcggtggctcacgcctgcaatcccagcactttgggaggccaaggctggcggatcacctgaggtccgaagtttgagaccagcctgaccaacatggagaaaccccgtctctactaaaatacaaaaaaattagctgggtgtggtggtgcgtgcctgtaatcccagctactcaggaggctgaggcaggagaatcacttgaacccgggtggcagaggttgcagtgagccaagatcatgccattgcactccagcctgggcaacaagagtgaaactccgtctcaaaaataaataaataaaatcattggaataattttcttctttaggaagagcagccttgggccaggcatggtggcacatgcctggaatccccgaactttgggcagcccaggtaggtggattgcttgagttcaagagttccagaccagcctggacaacatgatgaaacctcttcttgatcaaatatacagaatttcgactgagcacagtggctgtaagcccagcatgttgggaagctgaggtgggtgaatcatttgaggtcagaccagcctgactaacatggcgaaaccccatctctacaaaaaatacaaaagttagccaggaggtcgtgggcgcctgtggtcccagctactcgggaggctgaggcaggagaatgacgtgaatcccggagtcgtaggttgcagtgagccaagatcgtgccactgcacttcagcctgggcgacacagcaagactgaggttgcagtgagctgtgatcctcaacctcctgggttcaagggattgtcgagcctcagcctcccaagtagctgggattatagacattcgctcccatgcctggctaatttttgtattgcaaaaatgcactccagcctagatgacaggactgcactccagcctggatgacagagcaagactgtgtctcaaaaataaataaataaataaataaatagccaactgtgatcgtgcatgcctgtagtcccagctactcaggaggccaaggcaggaggatcacttgagactgggaggtcatggctacagtgagccatgatctcgcaactgcactccagcctgggcaacagagggagagaaaggaaggaaggagggaaggagggaaggagggaagggaaggagggaaaggaagtcagtcttgtgggacaaggaaggaaggaaggaagtcagtcagtcttgtgggactcagccctgaacctttgggatctgatgctgtccccaggtagggagtgtcagaactaaatcaaaggagaggacacccagctggtctctgctggagaactggttgttggtggggagaaacatacatttttggtgaagtattctgtgttgagtgtgaaagtaggaaaaacaggactgggtatggtggttcatgcctgtcattccaggattttgggaggccaaggcaggcggatcacttgaggtcaggactttgagaccaccctggtgaacatggcaaaaccccatctctactaaaaaaaaatacaaaaattagctgggcgcggtggcaggtgcctgtaataccagctactcgggaggctgaggcaggagaatcacttgaacccgggaggcggaggttgcagtgagctgagattgtgcctttgcactccagcctgggagacagagcaagactctccctcaaaaaaaaaaaaaggccgggcgcagtggctcacgcctataatatcagcactttgggaggccgaggcaggtggatcactgacacccaacaccacgccttctaattttttgcatttttagtagaaacggggtttcaccatgttggccaggcttgtctcgaactcctgtcctctggtgatccacctgccttggcctcccaaagtgctggaattacaggcgtgaacccagcaacttttcccccttttatcataccttaatttgcctccaccacccccagaagctccaagtctctacgccttttcatttatgtatgtatgtatttatttatttatttatttattttattttgagacagggtctccctctatctcccaggctgcagtgcagtggcgtgatcttggcccactgcaacctccacctcccgggttcaagtaatcctcctgtctcagcctcccaagtagctgggattacagggcacaccaccacacctggctaatttttgtatttttagtggagactgggtttcaccctgttgtccaggctagtctcaaactcccgacgtcaggtgatccacccatttcggttcccaaagtgttgagattacagaccgtgagccactgggacggacacccctactcctttcttcttcttcttctttttttttttttttttgagatggagtctccctttgaagcccaggctggagtacaatggtgcgatcttagctcactgcagtttcctcctcccgggttcaagtgattctcctgcctcagcctccggagtagctgggattacaggcacacaccaccacaccagctaatttttgtatttttagcagagatggggtttcaccatgttggccaggctggtctcaaactcctgacctcaggtgatccacccaccttggcctcccaaactgctgggatcacaggcgtgagccactgcaccctacactcttatactcctttctgtagctcaggcagctagatgagcttcaatcatctggcccttcctccagtctcacatttttgtgggactcctgtgcatacataattgaatctggtttttcttctgtcaaactgttttgtgtcaatgtaattcatagcccatccaaagaacctaggagggtggagggaatccattttctctcctccacactggagggccatggagcccaagagttcaagactggcccggtgtacaaagtgagacccagtctctatttaaaaaagatggggagggggccgggcacggtgtctcacgcctgtaattccagcactttgggaggcccaggtgggtggatcacctgaggtcaggagtccgagactagcctggccaaggtggtgagaccgtgtctttactaaaaatacaaaattagcttggtatggtggcaggagcctgtaatcccagctacttggaaggctagggcaggagaatcgcttggtttgggattttctccctgaggcacttgctatctccaggattatgggtctcaggtgaaagaaagacaaagaaggagagagagacagagagggacagggaaagagaatttcagacttatctaacattgacacttaggagaagtagggagaaagaggtgggaaaataaagtggctaggtaaaaatgaacatgtcagtaacaataatagcattaacaataactagtattgccgggtgcagtggctcacgcctctaatcccagcactttgggacgccgaggtgggcgaatcacaaggtcaggagttcaagaccagcctggccaacatggtgaaaccctgtctctactaaaaatacaaaaagttagctagctgggcatagtggtgcatgcctgtaatcccagctactctggaggctgaggcaggagaatcgcttgaacccgggaggcaaaggttgcagtgagtcaagatcaggccactgcactccagcccaagggacagagtgagactctgtctcaaataataataataataataactagtggccaggcacagtggctcacgcctgtaatcccagtgtagcaggacgagccacagacaaaaacctctcagacaccgagttgtagaaggaagggctttattcagctgggagcatcggcaagctactgtcttaaaatccaagctcctcgagtgcacagtttctgtcccttttaagggctcacaacactaaagactgcgcatgaaagggtcatgattgagcaatctaggggatacataacaggggtttcgtgcactgctggtcagagagaaagaatagggcagggagtttcacagtgttcttctatacaatgcctggaatctatggataacatcgggttctaagtcatgagttgatttttatctactaggtttacgccaggcaggcccaggcctggtttcgggtctggttttgggtctggtgcctggcgccgggctacctgcctttggtttcacttccttgtttttttctttttctttttttttttttttgagacagagtcttgctctgtcgctaaggctggagtgcagtggcacaatctcggctcactgcaagctccgcctcctggattcaagcaattctgctgcctcatccttccgagtagctgggattacaggcgcacgccaccatgcccggctaatttttgtatttttaatagagacggggtttcacc[139 bp omitted]tataaaacaatatgagacggtttctctcttccctcaccagcactttgggaggctgaggcaggtggatcacaaggtcagagtggatagcactttaggaggttgaggtgggaggatcccttgagcccaggagctcaagtccagcctgggcaacatagcaagacccccatttccaattttagtgtatgtgctgccaaagcaaatactctgagaccctgtttctacaaaaaataaaaaaattaaaattagtgcttggaaaaaaaaattagtgcttgaccaggaggcaagcacacctcctcatcctctcatggatgtctgtctgtagaaagtaaatggagacagcttcattttacccaactgctccgttttaggtccgctcctgagcttctgttgttcccagccatgcaaccctgggagccgactcccggctgcagagccttgtcagaagcaggcaatgtacacagagacccaaggcctggtgtagacaggctttcacagacctgggcattttgttgaattgtttttgaattgtggtttcttatcagttcatccgatactctgttctaaccacgtagttcctcttttggatctccaaacccctttgcaggttccatctacccgaaccaaactcacttattccaacagaagtctggtgtttcttgttttttttgtttgtttgtttctttcgttttgttttttgagatgttgtctccctctatcacccaggctggagtgcagtggcgagatctcagctcactgcaacctctgcttcccgggttcaagcaattctcctccctcagcctcctgggtagctgggattacaggtgcctgccgccacacccagctaacttttgtatttttagtagagacgggatttcaccatgttggccaggctagtctcgagctcctgacctcaagtgatccacccatctcagcctcccaaagtgctgggattacagccttaagccaccgcgctcaaccagaagtctgtttaaatccatccttctccccagccacccatgagttatgtgaccttggggttgctacttaacatttcagtctcaatttcctcaatagaacaaaagttagaagaattgtaacaaaagatagttttatttttatttttatttttattttttgagatggagtcttgctctgtcacctaggctggagtgcagtggtgtgatggtggctcactgcaagctccgcctcccggattcacgccattctcctgcctcagcctcccaagtagctgggactacaggcacccgccac[185 bp omitted]aaaatattctatataattccaaggtcaaagaagaaataacaaagggcatttttaaaaatgctagaactgagtggtggtgaaattgctgttgaaatgtgtttgttgcactgatggaaatttataaatgtaaatatttatattaaaatataaaataatgggccaggcatagtggctcacacctgtaatctcagtactttgggaggccaaggcgggagggccatggagcccaggagttcaagaccggcccggtgtacaaagtgagacccagtctctagttaaaaaagagggggagtgggccaggcacagtgtctcacgcctgtaattccagcactttgggaggccaaagcaggtggatcacccgaggtcaggagtccaagaccagcccggccaaggtggtgaaaccccgtgtctactaaaaatacaaaattagcttggtatggtggcgggagcctataatcccagctagggcaggagaatcacttgaacccgggaggcagaggttgcagtgagccaagatcatgccactgcactccagcctgggcaacaacagagagacttcatctctaaataaataaataaataaataaaagaaaatacaaattttttaaaaaaggtactgtggctgggcgtggtggttcacacctgtaatcccagcactttgggaagccgaggcaggtggatctcagatcaggagttcaagaagagcctggccagcatggtgaaaacctatctgtactaaaaattagcctggcatggtggcaggtgcctgtaggaggctgaggcaagagaattgcttgagccccggaggcagaggttgcagtgagccgagaccacaccactgcactccagcctgggcaacagagcgagagtctgtctcaaaaaggaaacaaaaaaaaaagtacctccaaattatggtagggtgtccatattaagaaggtagaaaaaggtcgggggaagtggatgcctgtaatcccagaactttgggaggctgaggcgggtggatcacctgaggtcaggagttcaagaacagcctggccaaaagggtatggtgaaaccccatctctactagaactacaaaattagccgggcgtggtggtacatgcctgtaatcccagctacacaggagtctgaggcaggagaatcacaggaaaccggcaggcagaggttgcagtgagctgagatcgcgccattgcactccagcctgggcgacaagagcaaaactccatctcaaaaaaaaaaaaaagaaaaaatgaaaaagaatttattgaaatgtgcagtctgaaaactgctcctgcacattttcattcatccttcctattccctccatccctcaattttttttttttttttgagacagagtttcgctcttgttgcccaggctggagtgcaatggcacgatctcagctcactgcaacctctgcctcccaggttccagccattttcctgcctcagcctccagaatagctggaattacaggcatctgccactacgcctggctaattttttgtgtatttttagtaga[144 bp omitted]tttgtttgtttgtttttgagacagagtcttgctctgtcacccaggctggagtgcagtggcgcgatctcagctcactgcaagctccgcctcccgggttcacgccattctcctgcctc[217 bp omitted]gagcgcggcagtgaagagctgggcttccggaagctgacagctgtttgtgatcttcaagacctcagacaggttttctaaatatgccttgccttcattttctcaaggaaagtgaaaaatgggtaggatcatggcaatcactactgtgtagcaatgtttagaggacttaataagtaaacacagggtcaagcatggtggctcacaccggaaatcccagcactttgggaggccgtggtgggaagattgcttaagcccatggggttgagaccagcctgggcaacatagtgagacctccatctctataaaaaatacaaaaatctagtcaggcgtgatggcgtatgcctgtagccttcagtaagctatgattgtgccactgcacaccagcctaggcgacagagtgagaccctgtctcaaaaagaaaaaacgaaaagaaatatagatgtacatatacatatgttggttctaaaacatgaaaaaggctgggcgcggtggttcgtgcctgcaacccaagcactttgggaggccgaggcgggcggatcacgaggtcaagagtttgagaccagcctggccaacatagtgaaaccccatctctactaaaaatacaaaaaaaaggctaggcgcagtggctcatgcctgtaatcctagcactttgggaggccgaggtgagcagattacctgaggttgggagttcaagaccaccctgtccaacatggtgaaaccccatctctactaaaaataagaaaattagccgggtacagtggcacgcgcctgtaatcccagctattcaggaggctgaggcaggagaatcgcttgaactctggaggcggaggttgcagtgagccaagattgcgccactgcactccagcccgggcgacagtgccagactcagtctcagaaaaaaaaaaagcaaaacaaacaaagaaacatgaaaaaaagctataaaacccaacttttttctttttttttttgagacggagtctcactctgtcgcccagggtggagtgcagtggtgcggtctcggctcactgcaacctccgcctcctgggttcaagcaattctctgcttcagcctcccaagtagctgggattacaggcacccgccaccacgcccgactaattttttgtatttttagttgagacggggtttcatcatcttggccaggctggtcttgaagtcctgacctcgtgatccacccgccttggcctcccaaagtgctggaattacaggcgtgagccaccgcgcccggccaaaacccaactttttagtc[433 bp omitted]tggccagcatggcaaaaccccgtctctattgaaaaaaatacaaaaattaaccaggcgttgtggcgcatgcttgtaatctcagctactcgggaggctgaggcaggggaatcacttgaagccggcaggcggaggctgcggggagccgagatcgtgccgttgcactccagcctggggaacagagcaagactccattaaaaataaaataataataatactgtgaatgtgaaactgatgaacttggtgcttttcatgcgtctcatagttgacgtgtcattgatatttcacttgaaatacggttggatttttattaataatatacctggggtgatgggagaaggtagccaatcacagctgaggcttctaagcggtgattctcagcctcggccgcaatcacaattatctgggactctcgaaagaactccagggtctgggcagtcccagtgtaaccaatcaagcagaatctctaggcgttcgtgctttgaaatgaggctccacataggtaagtttaacaggcagtcaagatggaggaccacaggtggagatcgggaagctcaggtgaaggaccgccccccaacaccccccgcccccaaaagacctctcagtaattccggtggatacaggaagtgctcagcaacgattacgccccgagggccaatcacagggctgcggccgagaaagaagccttaatagagctttctcaacctgcagccctcatctccgccggcgagtagggccaggtgttgggaggtgagtagctctccggcagctctgcaacttcatttctttatttctccattcc[144 bp omitted]gcctcccgagtagctgggactacaggcgcccgccaccacgcccggctaattttttgtatttttagtaggtggctcacgcctgtaatcccagcactttaggaggctgaggctggcagatcacctgaggtcgggagtttgagaccagcctggccagcatggcaaaaccccgtctctattgaaaaaaatacaaaaattaaccaggcgttgtggcgcatgcttgtaatctcagctactcgggaggctgaggcaggggaatcacttgaagccggcaggcggaggctgcggggagccgagatcgtgccgttgcactccagcctggggaacagagcaagactccattaaaaataaaataataataatactgtgaatgtgaaactgatgaacttggtgcttttcatgcgtctcatagttgacgtgtcattgatatttcacttgaaatacggttggatttttattaataatatacctggggtgatgggagaaggtagccaatcacagctgaggcttctaagcggtgattctcagcctcggccgcaatcacagttatctgggactctcgaaagaactccagggtctgggcagtcccagtgtaaccaatcaagcagaatctctaggcgttcgtgctttgaaatgaggctccacataggtaagtttaacaggcagtcaagatggaggaccacaggtggagatccggaagctcaggtgaaggaccgccccccaacaccccccgcccccaaaagacctctcagtaattccggtggatacaggaagtgctcagcaacgattacgccccgagggccaatcacagggctgcggccgagagagaagccttattagagctttctcaacctgcagccctcatctccgccggcgagtagggccaggtgttgggaggtgagtagctctccggcagctctgcaacttcatttctttatttctccattcc[131 bp omitted]ttctcctgcctc[136 bp omitted]tacaggcgtgagccaccgcgcccagccttttttttttttttttttttttttttcttctcttttttgagggtcttactctgtttcccaggctggagcgctgtggcaggatctcggctcactgaacccttgacctctcaggttcaagcagtcctcacgcctcagcctttgaagtagctgggaccgtgggagggtgccaccacatctgttctggctaataatattattattaccactgtttgcagagactcactagatgtagggtcttaatatgttgccgaagctggtctctaactcctgggctcaagcgatcttcctgcctcagactcccaaaattctgggattataggcaggtgccaccgcgcccggcctaaatcttttcttctgttagaaattaagtggttctgcctgtctcagtggctcacgcctgtaatcgcagcgctttgggaggccgaggcgggaggatcacctgaggtcgggagttcgagaccagcctgaccaacatgtagaaaccccatctctactaaaaatataaaattaggtgggcgtggtagcgcatacttgtaatcctagctactcaggaggctgaggcaggagaatcacttgaacccgggaagcggaggttgcggggagcctagatcataccattgctctccagcctgcgcagcaagagagaaactgtctcaaaaaataaaataaaataaaattcagtggttctgactggggaaagagtagcagatgcttagatctagagagactctagttaaggttggctcataagaggatagttgtgtgtgcttttatttctgttctcttgggggatttaggatagagctatagagagctccaaaaaaaaaaatatattggaacaggtcagatgctgtggttgctgtgtgtggagtcctgggcagtgctaaggttttgtgtctaatgagtcctcttaacaagaaggtattgttttttattcactgaggtgagggagcctcttagcatcattctagtccagcttccggacctgagtcttatgcaaatacctatgccagttgccattctcacgctattcacagctatcatataaagaggtgttataccctttctgtaaagtttttgttgctactgctatttttttttttttttttttgagacaaagtctagctctgtttcccaggctggagtacagtggcgctatctcagctcactgcaacttccacctcccaggttcaagcaattctcgtgcctcagccttctaagtagctgggactacagccgcctgtcaccaacctggctaattttcgtatttttagtcgatatagggtttcactatgttggccaggctggtctcaagctccagacctcaggtgatcctcccaccttggactcccaaagtgctgtgattacaggcgtgagccaccgcacccggccctgttgtttttaaaatagagacagggtcttaagttgccaggctggtctggaacttctggactggagtgatcacccacctgagcttcccaaagtgcggggattgcaagcgtcagccaccacccccagtgttgtgtttttgtttgttttaccaggctggagtgcagtggtgcgatcacagctcactgcagccttaacttccctggctcaggtgatcctcccacctcagcctcctcagtagctgggactacaggtgcatgccactatgcccagcacaattttttttttttttgtatttttttgtagagacagggttttgccatgttgcccaggctggtctcaaactccaagcaatcctcccaccttggcttcccaaagtgtttggggttccaggtgtgagccatggccccccggccagcttcagtaaagtaaaagccacacacctgtgtcctgagaccaggctccaccactaagttatctttaagccttttttttttttgagacagtttcactcttgtcgccccaggctggagtgcagtggcgccatgtcagctcaccacaacctctgcctcccactcccaggttcaagcgattctcctgcctc[168 bp omitted]caccgcgcccggctgtgtgtttgcattatcatattcagcccagttttcacgaagtttcttgtctcctgggtgatccacgtagctccccacttccttatctgatctatgcttgtcctttcattgttgtgttactactttgctataatgagagagtgttttcgctttataggttaacttttagaacctgagcagcccctcagggaaaaccctgacagtagctggttattttgcaattagaaaaactagctgggcactgaggcaggtgaatcacgaggtcaggagttcgagaccagcctggccaacttggtgaaaccccccatctctactaaaaatacaaaaaaattagctgggcacagtggtgaatgcctgtaatcccagctacttgggaggctgaggcaggagaattgcttgaatccgggaggcagaggttgtagtgagccgagattgcagcactgcactccagccagggtgacaaagtgagactccgtctcaaaaaaaaaaaaaaaaaaaatacaaaaagtagctgagcgtggtggtgggtgcccataatcccagctagtcgggaggctgaggcaggagaactgtttgaacctgggaggcagaggttgcagtgagctgagatcgtactactgtactccagcctgggctgcagagtgaaactatctcaaaaataagtaaataaaagtaaaatgagttgaggtcttgctctgttgcccagatgggagtgcagtggcacaatcaaggctcactgcagtttcagtctcccaggctcaagcaatcctcccactgcagcctcctgagtagctgggactacaggcatgtaccaccacccactgctaacttatttttcatggagatgggggtctcactatgttgcccaggctgggagtttgttcttgaagaagcagggtagatggtgagtgtccttgttcgtggcacagcaggaactggcatttgagacaggagtgctaatcaccatccctctccactcctcccttgattgtcatcacagctcccacgtgggacaagatggtgtcttcggcgcagatgggcttcaacctgcaggctctcctggagcagctcagccaggatgagttgagcaagttcaagtatctgatcacgaccttctccctggcacacgagctccagaagatcccccacaaggaggtagacaaggctgatgggaagcaactggtagaaatcctcaccacccattgtgacagctactgggtggagatggcgagcctccaggtctttgaaaagatgcaccgaatggatctgtctgagagagcaaaggatgaagtcagaggtgagtggaaatcggtccacactgtgtcctaggaggaagcaggcgtcctctccaggactttagaaattcagaaggccaggcgcgctggctcacgcctgtcgtcccagccctttgggaggctgaggcggttggaccacctgagggtcaggagtttgagaccagcctgaccaacatggtgatgaaacagcatctctactaaaaatacaaaaatttgctggacgtggtggcagacacctgtaatcccagctactccgggaggctgaggcaggagaatcacttaaatctaggaggcgggggttgctatgagccgagatcacgccattgcaccccagcctgggcaacaagagcaaaattctgtctcaaaaaaaaaaagaaatggcattgaggcttggagagggactgcttgttctgaatgcaggtgctggatcttcataaaccctggtgtctgtcctggtccttattttctacctacttctttttttttttttttttgtccttttatttttttattttttattttattattattattttttttattatactttaagttttagggtacatgtgcacattgtgcaggttagttacatatgtatacatgtgccatgctggtgcgctgcacccactaactcgtcatctagcattaggtatatctcccaatgctatccctcccccctccccccaccccaccacagtccccagagtgtgatgttccccttcctgtgtccatgtgatctcattgttcaattcccacctatgagtgagaatatgcggtgtttggttttttgttcttgtgatagtttactgagaatgatggtttccaatttcatccatgtccctacaaaggacatgaactcatcattttttatggctgcattgtattccatggtatatatgtgccacattttcttaatccagtctatcattgttggacatttgggttggttccaagtctttgctattgtgaataatgctgcaataaacatacgtgtgcatgtgtctttatagcagcatgatttatagtcatttgggtatatacccagtaatgggatggctgggtcaaatggtatttctagttctagatccctgaggaatccccacaccgacttccacaatggttgaactagtttacagtcccaccaacagtgtgaaagtgttcctatttctccacatcctctccagcacctgttgtttcctgactttttaatgatcgccattctaactggtgtgagatgatatctcatagtggttttgatttgcatttctctgatggccagtgatgatgagcattttttcatgtgttttttggctgcataaatgtcttcttttgagaagtgtctgttcatgtcgttcgcccactttttgatggggttgtttgtttttttcttgtaaattattttctacctatttctatcgctttcaggtatcgtacagttggcctaacatatctgtggatttaaccaatcctagatcaaaaataatgggggcaaagacaattaaaaataacaatacaataaaatgcacatgaactatggttatttaactcttcttgagagaggatctcactctgtcacccaggctggaattt[132 bp omitted]gtattctaaatagagatggggtttcaccatgttagccaggatagtctcgatgtcgtgacctcatgatctgcccgcctcggcctcccaaagtgttgggattacaggcgtgagccaccgcacccagccagcaagtgcatttagaactactctactttctaccccataacttttttttttgtttgtttgagacaagtctcactctgtcacccaggatggagtgcagcagcacaatctcagcttattgcaactcccgccccctgggttcaagtgtttctcctgcatcagcctcttgaatagctaggattatacaggcacctgccactgtgcctggctaaattttgtattttaatagagatggggtttcactatgttggccaggctggtcttgaactcctgaccacgtgatcaacccgcctcagcctcccaatgtgctggaattacaggtgtgagccgccatgcccagctacacttttttttgaaacggggtctcgttttcttgctcaggctggagtacaatggggcaatcacagctcactgcagccttgacctcccagacttgagcaatcctaccactatggcctcccaccacacctcgctcattcttgtatatatatatatttttgtagagatagggtttcaccatgttgcccaggctggtctcgaacttctgtgggctcaaccgatcctcctgccttggcttcccacagtcctgggatcagaaacatgagccacagtgcctggccagtgcagctttatttacagtaaccaagatatagagtcagtctaagtgaccatcagtggatgaataaaaaatgtgcccgttgggtaccctgcctactgcctgggttatgagattgttgggaccccaagccttaaaaaggaaacatggtaggccgggcacagtggctcacgcctgtaatcacagcactttgggaggccaaggcgggtggatcacttgaggccaggagtttgagaccagtcaggccaatgtggtgaaaccctgtctctactaaaaatataaaaaaatcagccgggcgtggtggcacactcctgtagtcccagctacttgggaggctgaggcaggaggattgcttgaaccagagagtcagaggttgcagtgagccaagatcgtgccactgcgctccagcctgggtgacagcaagactccatctcaaaaaaaaaaaacaaacaaacatggtattaattacacaatggaatactcctcaaccttaaggaactcctatctttttatttaaaaattgccagttttatttcagctagagatcactttttagcataatgtttcctgtctttaacaatgggtgagggtttttttttttttttttttggtttggtttggattttggttttgcttttgagtcgaagtttcactcttgtctcccaggctagagtgcaatggcgcgatctcggctcactgtgacctcctcctcccaggtttaagtgattctcctgcctcagcctccagagtagctgggattacaggcgcctaccaccatgcccgctaatttttgtattttagtagagacagggttttaccatgttgaccagactggtctcgaactcccgacctcaggtgatctgcccacctcagcctcccagagtgctgggattacaggtgtgagcaaccatgcccggccaagggtttttaactttagctgacctccggaggttacaagtttgaaaacggcaggaggaaacccagagagttgtaaacttacgaaggtctgggctctgaaaaagatacaaattttctttccatgccaatagcgctcacacagacatggtgaatgttcctgaaacccgccggactttctgtaagaagtgtggcaagcaccacccccacaaagtgacacaaggcaaggattcttggtatgcccaggggaagtagtgttatgacaggaagcagagtggctatggtgggcagactaagccgattttccggaaaaaggctaaaactacaaagaagattgtgctaaggcttgagtgccttgagcccaactgcagatctaagaatgctggctattaaaagatacaagcagccaagcgcggtggctcacgcctgtaatcccaacactttgggaggccgaggtgggcggatcacaaggtcaggagtctgagaccagcctggccaaaatggtgaaaccccatctctactaaaaatacaaaacttagctgggcatggtggtgtatgcctatagtcccagctactcaggaagctgaggcaggagaatcgcttgaacctgggaggcagaggttgcagtgagccaagattgtgccactccagcctgggcaacagagtgacactctgtctcaaaaaaaaaagatgcaagcattttgaactggaaggagataagagaaaggaacaagtgatccagttctaagtgtcatcttttcttttatgaaggcaataaaatcttgagcttatggtaaaatgcaaaattttccccccttctcctttttcagaagcagctttgaaatcctttaataaaaggaagcctctatcattaggtaagttacctcatttataacttttattcttcatgtgagatctggggactcgggcctttgttttaaggagaatgtgctgagcactaagaatgcaaagaaatgccggacttagcatccctgctcccagggcggagctggtctcgcaggtgcgtagcagtaagacctgggaagctgaaacacgatcgcgtttgttggaaatctataaatacatacaaagcggggaagggtaagcttggcctttgaatctggataaggtagagacttttcttttttgagatggaggcttgctctgtcacctaggctgaagtgcagtggtacgacctcggctgactgcaacctctacctcctgggttcaagcagttctcctgcctcagcctctagaatagctgggattacaggtacctgccaccaggcccggctaattttttgtggtgtttgtagagatggggtttcaccatgatggccaggctggtcttgaactcctgacctcaagtgatctgcccacctcagcgtcccaaaatgctgggattatgggcatgagccaccaccacacccggttttgtttttttttttttttttttttttttttttttttttttgaaacagggcttcactctgtcacttaggctggagtggtgcaatcatggttcactgcagccttgacctcccaagctctggtgatcctcctgcctcagcctcctgagtagctgggaccacaggcacttgccaccatgcctggctaatttttttcactttttgtagagacagggtcttgctatgttgcccaggctggcctcgaattactaaactcaatcagtcctcctgcctcaccctcccaaactgctggggtacaggtgtgagccatgacacctggcccttaccagctacttatatcctgaagattattattattttttttttttttgagatagagtctctctctgttgcccaggctggagtgcagtggcgtgatctcggctcactgcaagctccgcctcccgggttcatgccattctcctgcctcagcctcccgagtagctgggactacaggcgcccaccaccacgcctggctaatttttttgtgtttttagtagagacggg[148 bp omitted]cggcttgattgcagtggcacagtcatagctcattgcagcctcaaccttccaggctccagagatcctcttacctcagcctcctgagtagctgggactacaggtgtgcactgccacacctgactaatatttgtatttttggtagggacagtttcactatgttgccagatatggtgtcaaactcctggtctcaagtgatcctcccaccttggcctcccaaagtgctgggattacagacatgattcaccacacctggccatgaagactttttttttttggacaaagtctcactctgttgcccaggatggaatgcagtggcatgatctcagctcactgcaacctctgacctccgcctcccggttcaagtgattctcttgcctcagcctcccgagtagctgggattataggtgtctgccaccaagcccagctaatttttgtaattttagtagagatggggtttcaccatgttggccaggctggtcttgaactcctgacctcgtgatccacgtgcctcagcctcccaaagtgttgggattacaggtgtgagtcactgcgcctggtctcatgaagaccttttttgagacagagtcttgctctgtcacccaggctggagtgcagtggtacaatctcactgcagcctccgcctcccaggttcaagtgattctcctgccttagcctcccaagtagctgggattacaggcgcctaccaccacgtctggctaatttttgtatttttagtagagacagggtttcaccatgttggccaggctggtctcaaactgctgacctcaaatgaactgtctgcctcagcctcacaaagtactgggattacaggcatgagccacctcacctggtggtgaagactctaaaggctcttctcagatcagcctttgtcctgaatttcacatgcccgtgtccagttccctccccagcatcttttcaggagttccatggactcacctcttcattatccagggttaagctgcagatattgttattaggattccaccttgttctctctctttttttttttttttttgatacggagtctcgcttgctcttttgccaggctgaagtgcagtggagcgatcttggctcactgcaatctccgcctcctgggttcaagcaattcccttgcctcagcctcgcaagtagctgggacttacaggtaacacaccaccatgcccggctaattttttgttttagtagagacggggcttcaccatgttggccgggatggtctcgatctcctgacctcatgatccgcctgccttggcctcccaaagtgttgggttacaggcatgagccaccatgcccggctgattccaccttgttcttacattctttcccagttcattttaaatttatctacctcatcagaaactagggggttaggcctggcaggcagatcacctgaggttgggagttcgagaccagcctgaccaacgtagagaaaccctgtctgtactaaaaatacaaaattagccaggtatggtggcacattcctgtaatcccagctactccggaggccgaggcaggagaatcacttgaacccaggaggcggaggttgcagtgagccgacatcacaccattgcattccagcctgggcaacaagagcaaaactacatctcaaaaaaaaagaaaaactaggcagttaatcctcaaagcctttccagtggccttatgcgtgagtagtttgtgtgtgtgtgtgtgtgtgtgtgtgtgtgtgtgtgtctttcacaccatgtgttctgaactacttaggaattctcaccagaaaggcacataaacctgggatcatggcctaatgtactttcacttttacatccagtaccttatcaacgtcctttttagtacctaatctaggcttcactactgagactcaggggtccaacttgagccatcttggagtcccactgccagcacagcaacaggcctgtaatgccgccctttttctccagggataacacggaaagaacgaccacctctagacgtggacgaaatgctggagcgcttcaaaacagaagcacaaggtgggtgtcaggacctccaatgttggagtcagctgaggaagccccccgttcttgctgctatctcctgttcctttgaagaaccccatctctctccaatcttttcctccactattcttaatgtgcccactgtctcctggagaatgccaacctcccttccgtaagaatagagggaagaacgaacgttgcagagaattagaactcagtttgtagaaagttaggagcacagcgcagagagtttttgtttttgtttttgttttgagacagtttctctgttggccaggttggaatgcaatggcgcgatctcggctcactgtaacctccacctcccaggttcaagcgattctcctgattctcctgactcagcctcctgagtagctgggattataggcacctgccaccacacccagctaatttttttttttttttttgagacgaagtcttgttcttgtcacccaggctggagtatagtggcaccatccctgttcactgcaacctccgcctcccagattcaagtgattgtcctgtctcagcctcctgagtagctgggactacaggtgcatgccaccacgcccagctaatttttttttgtacttttagtagagacaggtttcaccatctcattcagggtggtctcaaactcctgacctcaagagatctgctccacccacccccaagtctcccgaagtgctgggattacaggcgagagccaccgtacccggccttctttaaattatttaaaagttgacaggtggccaggtgtggtggctctcacctataatctcccagcactttgggaggctgaggcgggtggatcaagagatcgagaccatcctggccaacatggtgaaacccaactctactaaaaacacaaaaattagccgggtgtggtggcacccgcctgtagtcccagctactcaggaggctgaggcaggagaatcgcttgaacccgggaggtggaggttgcagtgagccaagattgtgccactgcactccagcctggcaacagtgcgagactccatcttaaaaaaaaaaaaaaaaaattgacaggcataaatgtatttatggtacattgctcagacaactttaatataaacaacttacagagaaaattgagtcttttgggtaggtgacttgcctgagctgactttgtgataggttttttctgttttttttgtttttgaaatagagtctcactctgtcatgcaggctggagtgcagtggccccatcttggctcactgcaatctctgcctcctgggttcaaggggtcttcctgccacagcctccccaggtgctgggactataggtgcccaccactatgcctggctaacttttgtgtttttagtacagatggggtttcaacagggtagccaggttggtctagaactcctgacctcaagtgatccacctacctcggtctcctaaagtgctgggattacagctgtgaaccaccgcacctagcctgtgatcagtttcagatcagccttgcttactccacattccctcttatcttcctggtagcatttttgttttttcttgagaaagagttttgcccttgtcgcccaggctagagtgcaatggtgtgatctcggctcgccacaacctccacctcccaggttcaagtgattctgcctcagcctcccgagtagctgggatcataggcgcccaccaccacatctggctaatttttgcatttgttagttttatttttagtagacagggtttcaccatgttgggcaggctggtcttgaactcctgacctcaggtgatccacccacttcggcctcccaaagtgctgggattacaggcatgagccaccgtacctagcccacattgacttttgatacagcaagtatttcttgctatggctctgtataatagaggtgagtaacttggttgaaggaattgtttgccctgttcatctctctagacacggccaatgtcattcctggcacacaatctttttttttcttgagatggagtctcactctgttgcccagactggagtgcagtggtgcaatcttggcccactgcaacctctgctacccaggttcaagcgattctcctgcctcagcctcccaaatagctgggagtacaggtgtgtgccaccacgcccagctaattttttgtattttagtagagacagggtttcaccgtgttagtcaggatggtctggatctcctaacctcgtgatccgtccgcctcagcctcccaaagtgctgggatgacaggcgtgagccactgtgcccagcctagcacacaatcttgacaaagaatttcggtgcgacttggggtactgtggtgcctgctctatcatcatgcttcagcaggaaatgtgggtgaatagtgcctggtggcatggcaggtaaagaaatgttttgttttgtttttttttttgagacagtcttgctctgtcacccaagctggagtgcagtggcgcaatctcggctcactgcaagctccatctcccgggttcacgccattctgcctcagcctccccagtagctgggactacaggcgcccgccacacgcccggctaattttttgtatttgtagtagagacagggtttcacc[140 bp omitted]gcagatttattggagaaagtaggaaaagacattggcagagagaccccagcgggcaggttgtcatgagtagctcactgccaggagaccaaagcttcctgcagattttatagaatagggcttgggctgattgataatgtcaacagggggtttaacttgcggtcttctttcagcagaagtgtttgataaactgaggcgtttcatggcaaacagggagtttgtgagctctgtgtgtgatctggccaggaaggccaaacatcttgggccgtatctcctggaccataaaagcagacctggcccagtgcagtggttcatgcctgcaatcccagcactttgggaggctgaggtgggtggatcatctgaggtcagcagttttagactggcctggccaacatggcgaaaccccatctctactaaaaatacaaaaattagcctagacgcagtggcacatgcctgtaattccagttacttgggaagctgaggcaggagaatcgcttgaacccgggaggcggaggttgcagtgagctgagattgcgccactgcactccagcctgggcaacagagtgagactgtctcaaacagacctatagctgacctgtttcctcttgtttgtatgccctgaaccatggaggaaagcttatttatttattttattgagatggagtcttgctctgttgcccagggtggagtgcagtagtgcgatctcttactacaacctccatctcccaggttcaagcaattctcgagcctcttggcctcccaagtagctgagattacaggcatgcgccaccacgcctggctaatttttgcatttttagtagagatggggtttctgtgttggccaggctggtctcgaactcctgagctcaagtgatccaccccacctcagcctcccaaagttctgggattataggcatgagccaccacacctggccggaaaacacatttgtagcttatttgctttatctgatcccgtgccccccctcccccccgccccatcagcctgcctccttttctctaattgggactccacaggaaatacacctgattttgtgtcaatctcacatgagtttgtattttgtagcgtttacagaaacgaaaggaaatgtcatctgcctgggtaaagaagtctttaaaggaaaaaagccaggtctgtaccatatcttcctgcagggagcttgggatcagatttctctttataaacttgaagtcctcttaactttcctatgtaacacaaagcatttatttatgtatgtatgtatcgagacggagttttgctcttgttgcccaggctggagtgccgtggcgtgatctcgactcactgcaacctccgcctcccaggttcaagcaattctcctgcctcagcctcccgagtagctgggattacaggcatgcgccaccatgactggctaattttttatttttagtagagacaaggtttcttcatgttggtcaggctggtgttgaactcccaatgtcaggtgatctgcctgcctcgacctcccaaagggctgggattacaggcatgagccactgtgcccggccaacacaaggcattttgttattttggttttccctatgggtaactgattgcatcctctctcccttccctcctcaccaatgataaagacaaagacaataggtgcaggtatatattgaagacgaagttccgggagatgtggaagagctggcctggagatagcaaagaggtccaggttatggctgagagatacaagatgctgatcccattcagcaaccccagggtgcttcccgggcccttctcatacacggtggtgctgtatggtcctgcaggccttgggaaaaccacgctggcccagaaactaatgctagactgggcagaggacaacctcatccacaaattcaaatatgcgttctacctcagctgcagggagctcagccgcctgggcccgtgcagttttgcagagctggtcttcagggactggcctgaattgcaggatgacattccacacatcctagcccaagcacggaaaatcttgttcgtgattgacggctttgatgagctgggagccgcacctggggcgctgatcgaggacatctgcggggactgggagaagaagaagccggtgcccgtcctcctggggagtttgctgaacagggtgatgttacccaaggccgccctgctggtcaccacgcggcccagggccctgagggacctccggatcctggcggaggagccgatctacataagggtggagggcttcctggaggaggacaggagggcctatttcctgagacactttggagacgaggaccaagccatgcgtgcctttgagctaatgaggagcaacgcggccctgttccagctgggctcggcccccgcggtgtgctggatcgtgtgcacgactctgaagctgcagatggagaagggggaggacccggtccccacctgcctcacccgcacggggctgttcctgcgtttcctctgcagccggttcccgcagggcgcacagctgcggggcgcgctgcggacgctgagcctcctggccgcgcagggcctgtgggcgcagacgtccgtgcttcaccgagaggatctggaaaggctcggggtgcaggagtccgacctccgtctgttcctggacggagacatcctccgccaggacagagtctccaaaggctgctactccttcatccacctcagcttccagcagtttctcactgccctgttctacaccctggagaaggaggaggaagaggatagggacggccacacctgggacattggggacgtacagaagctgctttccggagtagaaagactcaggaaccccgacctgatccaagcaggctactactcctttggcctcgctaacgagaagagagccaaggagttggaggccacttttggctgccggatgtcaccggacatcaaacaggaattgctgcgatgcgacataagttgtaagggtggacattcaacggtgacagacctgcaggagctcctcggctgtctgtacgagtctcaggaggaggagctggtgaaggaggtgatggctcagttcaaagaaatatccctgcacttaaatgcagtagacgttgtgccatcttcattctgcgtcaagcactgtcgaaacctgcagaaaatgtcactgcaggtaataaaggagaatctcccggagaatgtcactgcgtctgaatcagacgccgaggttgagaggtgagaaccgtttcactctaccagtcgttccatctttagcctcatcccatgcccccttaggaagaggccagagcctcctatgcactgtggcttagggtcaggaattccctcttgttggactctttgtttgtttttgttttgagatggagtcttgctctgtcgctcaggctggagcgcagtggcgcgatcttggctccctgcaacctccgcctcccgggttcaagtgattcttctgcctcagcctcctgagtagctgggactacaggcgcctgccaccttgcccggctaatttttatattttcattagagacgggatctcagcatgttggccagtctggtcttgaactccgcctgacctcaggtgatccacctgcctcagcctccaaagtgggattacaggcatgattcaccatgcccggcccaaatatatttttttaagacagggtcttgctgtgttgctcaggctggagtacagtggtgaaatcagctcactgcatcctcaaacttctgggttcaagtgatgttcctgagtacctgggatgacaggtattaagtgtgcaccatcatgtccagctaacttaagtgggggtttttttttgtgtttttttttttttttttttttttggaaagacaaaatctcactatgttgtccaggctggtcttgaactcccaaagcactgagattacaggcatgagttaccacacgccctgcctgaatatttcttattgatatgtatagatatgtatattcccaatctttttttttttttttgagacggagtttcactctttttcccaggtcggagtgaagtggctcgatctcggctcactgcaacctccgccccaccaggttcaatgattctcctgcctcagcctcatgagtagctgggattacagccacccacgaccatgcccagctaatttttgtacttttagtagagacggggtttcaccatgttggccaggcaggtctcgaactcccgacctcaggtgatccacccgcctcagcctcacaaagtgctaggattataggcgtgagtcaccgtgcccggtctatattctctatcttttatcaatgatgtgcttagcattttaacttatttttaccctctattggatttttgtctaagaagaataggttctttctcctgtgatgcttcttgggtgttgagttgtctgatggtggtgctaataagtgattacatggtccagctttcaattgtactcatttgtcaggggtatatgcccagagaaaccctaaatacttcagccgtgatggacacacatttggtgtaaccctttcttctcttccctatagatcccaggatgatcagcacatgcttcctttctggacggacctttgttccatatttggatcaaataaggatctgatgggtctagcaatcaatgatagctttctcagtgcctccctagtaaggatcctgtgtgaacaaatagcctctgacacctgtcatctccagagagtggtgtaagtagaaactaattcatgaactcaaatccttagggtatgaaaatggtacaatgttaacatcggagcaatattcagattcctgtactagactcttaagtgctcgagacacagggaattgagagagtcctgtccttaaatttattttgtgggataatcgtataaagtaatttctaggggctgggcatggtggttcacacttgtaattccaacacttcgggaggccgaggcagacagatcacttgaggtcaggagttcgagaccagcctggccaacgtgacaaaaccctgcctctactaaaaatacaaaaattatccaggcgtggtggcaggcacctgtaatatcagctacttgggaggctgaggcaggagaattacttgaacccaggaggcggaggttgcagtgaaccaagatcctgccactggactccagtctgagtgacagagcgagactgcgtctcaaaaaaaaaaaaaaaaaaaaagaaaaagaaaaaaagggccgggcacaatggctcacgcctgtagtcccagcactttgggggcccaaggtggggggatcacttgaggtcaggagttcaagaccagcctggccaagatggtgcaagaccctgtctctacgaaaaatacaaaaatttgccaggtgtcgtggcaggtgcctataatcccagctactccggatgctgagggtaggagtcgcttgaatccgggaggcagagtttgctttgcagtgagccgagatcgcgccactgcactccagcctgggcaacagagtgagactccatctcaaagaaaaaaaaaatctgtaaagatggacaaaaatttaaacatggaaaaaatagttcctaaagtttaaatatatcgagcccctggtttccatttaagtacgatacaggtgtacacactaaagatttcactttcgttctcttttccctaggttcaaaaacatttccccagctgatgctcatcggaacctctgcctagctcttcgaggtcacaagactgtaacgtatctgacccttcaaggcaatgaccaggatgatatgtttcccgcattgtgtgaggtcttgagacatccagaatgtaacctgcgatatctcgggtatatctcttaatcattaaaatccttcatcatacaaacataagctaccacaagcttatgtggcaattttgtgtaaataagaaaaagttcgttattctgactagaaacagtactaagggcagatgacccaggatgcagcatgggctgaacttgagtttctacttgccttgaacagtaaacaccctggacaaccatacgtgaggaccctgaatccaaagaaactcccagaatctttatcatctttttttttttttttatgaagtcttgctctgttgcccaggccaaagtgcaatggcacgatcttggctcactgcaacctctgtctcctgggttcaagtaattctgctgcctcagcctcccaagttgctgggattacaggcacccgccaccacgcccggctaatttttgtgcatttagtggagctggtttcgccacattgccaggctggtctcgaactcatgacctcaggtgacctgccctcctcaggctcccaaagtgctgggattataggcatgagccaccatgcccagccagagtccttatgttttggttttggttttggttttttctttttcttttttctttttgagatggagtctcgctctgtcacccaggctggagtgcgttggtatgatctcaggtcactgcagcctccacctcccaggttcaagtgattctcctgcctcagcctcctgagtagctgggattacaggtgcacaccaccacacctggttaatttttgtattattagtagagatggagttttaccacattggccaggctggtctcgaactcatgacctcaggtgatctacccccccacccccaccccaccccgccgtcggcctcccaaagtgaggcatgagccaccgtgcccagcccagaatctttatcttctatcagagatcattcactcatggttcatgcttctcctgtatgatgattcagaataccagctattgacatttttcaagcaagaacccttcaggaacatcaagttgccccttttctgttagtcctctggtttgagagctctccccttgggaagctgtccagtggctgcccaggcgatgagaacctacatgcatcatggggttccatgaagcctcacttggccacactggtgtagtaggtggtcattggcctcaaattattgccctgggccaggcgcagtggctcacgcctgggaggccgaggtgggtggatcacttgaggtcaggagttcaagaccggcctggtcaacatggtgaaactctgtctctactaataatacaaaaattagctgggcatgttggcgcacgcctgtagtcccagctactcaggaggctgaggcaggagcatcatttgaacctgagaggcggaggttgcagtgagctgagatcacaccaccgcactccagtctgggcaacagtgtgagactgtctcaaaaaaaaaaaaaaaaatcttggctgggtgcggtagctcatgcctgtaatcccagcactttgggaggccaaggcaggtggatcacaaggtcaggagttcaagaccagcctggccaacatggtgaaaccccacgtctactaaaaatacaaaaacattagctgggcatggtggcgcgtgcctgtaatcccagctactcatggaggctgatgcaagagaattgcttgaacctaggaggcagaggtagcagtgagccaagatcacgccattgcactccagcctgggcaacagagcaaaactccatctcgaggacagaaaaaaaattgattgctctggctctactgatacaatcttaggctgcttaatgggatcttagttgaataggatgctgtacatcttacaggtattggaaggttgaatgaaaccaagcccatgcattcaatagtggctgctatcattactaaccgttgcaattaccctcttttctttttgcctgagaataatgggatgcagggtgagggggaatattgggtgaattaaagatttgggtcactaatttctttctttttttctcaagatatagtcttgctctgtctcctaggctggagtgcagtgccacaatcttggttcactgcaacctctgcctcccgggttcaagtgattcttctccgtcaacctcccaagtagctgggattacaggcacccacctgtatttttgtatttctagtattttgtatttctagtagagacagggttacgccatgctggtggccagggtggtctcaaactcctgacctcgggcaatccaccacacccagctaatttttggtatatttagtagagccggggtttcaccgtgttggctgggctggtctcgaactcctgacctcaagtgacatccatcttccaaaatgctgggattacagccatgtgccaccacgcccagctaattcttgtatttttaggagaaatggggtttcatcatgttgttccggctggtcttaaactcctggcctcatgatccacctgccttggcctgccaaagtcctgggattacaggcatgagccactgtgcccagccactcatttcttatgaatttattctaacacattttccggatgaacagggcaccttgaaacataggttagtgggctgggtatggtggctcctgcctgtaatcccagtactttgggaggcctaggctggtgtatcgcttgaagtcaggagttttttgttttgagacggagtcttgctctgtcgcccaggctagagtgcagtggagtgatctcggcttactgcaacctccgcctcctgggttcaagtgattctcttgcctcagcctcctgagtagctgggactacaggcacgtgtcgccacgcccatctaacttttgtatgtttagtagagccggggttt[132 bp omitted]catggtaaaaccccatctctactaaaaaatacaaaaattagccaggcaagatggcatttgcctgtaatcccagctactcaggaggctgaggcgggagaatctcttgaatctgggaggcagaggttgctgtgagctgagatcgcgccactacactccagccagggcgacagagcataaataactccctttcaaaaaaccaaacaatgaaacataggttagcggagtctgcatccaacattagagtcagattgactaagttctgtatttccagctgattcctgggcgatgttggtgccactggtctgaccaccctttgacaactgctgctccagataattcaagtcggggtataacacaaccagtgagatgtaaaccaaagacgattccacggttagattctcaagaatgacttgttctgccgggcgcggtggctcacgcctgtcatcccagcactctgggaggccgaggtgggcagatcacctgagattgggagtttgagaccagcctgaccaacatggagagacccccacctctactgaaaatacaaaattagctgggcatgttggtgcatggtgcatgcctgcagtcccagctactcgggaggctgaggcaggagaatcacttgaacccaggaggcggaggttgctgtgagccgagattgcgccacctgggcaacaagagtgagactcagtctcaaaaaaaaaaaaaaaatgacgtggtcctatttctcccacaggttggtgtcttgttccgctaccactcagcagtgggctgatctctccttggcccttgaagtcaaccagtccctgacgtgcgtaaacctctccgacaatgagcttctggatgagggtgctaagttgctgtacacaactttgagacaccccaagtgctttctgcagaggttgtcgtaagtctctcctctcttacagagcagctgtgctttcgatctggggccacagacgagcaatggtcatgcctgacttggctgtatggaacctctcgctgatgtgaacacctgttcccatgtttagatccaggccgatggcctgtgaattttgttcttctctcattcctattccttcataggatcaccagtgcatgatagaaggtggggagttcacaagaaggggcttttggatgctggcacttgtggagctagccgggaaggttgaagttggacctgtcaaccgtgttgccatttgtgattcttttgtaggttggaaaactgtcaccttacagaagccaattgcaaggaccttgctgctgtgttggttgtcagccgggagctgacacacctgtgcttggccaagaaccccattgggaatacaggggtgaagtttctgtgtgagggcttgaggtaccccgagtgtaaactgcagaccttggtgtaagtccgtgctggctgcctgtgtgcgtgggtgtatatgcacacgccccccacctccgggtttgagtagggtggttatgagaacacttaattcctctaaaagttccaagcatgatgctaatgacaactggtaagacctgggtagatgatggtaggaaaaaagtataagtagtagtagagtagtagtaatattctatagggatttggggaatgtagctggttttcgggttttttttttcctctttatgtatgtatgtattttagagatgggatctcgccgtgttgcctaggctggtctcaaactcctgagctcaagagatctgcctgccttggcctcccaaagtgctagaattacaggcatgagccatgtcaccccatgctgtgttttctcttaatctgtgttcttagaactataactgtaacataaattgcatgcaattggttgtaaatggaattcatttacttattttttaatgaatgatttgcaaatcaggtagtcttctgggccagtgtacgctcagactcccaatggaagctattggaagctacatgctcaatgtgatcctccttttaatactaaaatcacaggacacgtggcctggcatagtggctcacgcctataatcccatcaccttgggaggccgaagcaaggcagatcccttgagggcaggagttcaagaccagcctgcccaacatggtgaaacattgtctctctactaaaaatacaaaaattagtcacgcatggtgggacatgcctgtaatcccagttactcaggaggctaaggcaggagaatcacttgaacttcggaggtggaggttgcagtgagctgagatggcaccactgaagtccagtctggccaatagagcaagactctctcaaaaaaaaaaaattataggacaaatctttagaaaggaattggggcctggcatggtggctcatgcctgtaatctcagcactttaggaggcgggcagaacacctgaggtcaggagtttgagaccagcctggctgatgcagtgaaaccctgtctctactaaaaatacaaaaattagctaggcgtggtggtatggtcctgtaatcccagctacttgggaggctgaggcaggagaatcgcttgaagtcgggaggttgcagtgagccgagatcgtgccagcctgggtgacagaacgagattgtctcaaaaaaaaaaaaaaattgtatctgcactgatggtttctgttcagagattcgattttatgttaacatctctggtattttttttttttttttttaagatggagttttactcttgcccacgctggcaatggcatgatctaggctcactgcaacctccggcttcaaggaggttgattctcctgcctcagcctcctgagtagctgggattacaggcactcaccaccacgccgggctaatttttatatttttagtagagatgggatttcaccatgttggccaggttggtctcgaactgacctcatgatccgcccgcctcagccttccaaagtgctaggatttacaggcatgagccactgcgtccagccatacatatctctggtattctttgtctctaacatcacctccaacagttaggaactgtcctcttcctatgaagtaactaatctaggatatgtacctggcatctgaaaactacccacttaaatttaatgacatattcagttcatggctggagacgatgagtagaaggaaaggattcttcccacacccactatatctaggccctgaaacattaaaaaagaagtcccacaagcagtgagatgtcaccgactcactaactgtatcttcaaatgaatgtctagtttttttggttgtgtgtgtgtgtggtgtgtggtgtgtgtggtatttttttgggggggggggggttttcttttttttttttttttggttttttttttttgatagtcttgctctgtcgcccaggctggaatgcagtggctccatctcagctcactgcaacctccacctcctgagttcaggtgtgattctcctgcctcagcctcccagggattaaggtgcatgccaccacgcccagctaacttctttatttttagtagagacgagttttcaccatgttggtcaagctggtctcgaattcctgacctcaggtgatccacccacctcagcctcccaaagtgctgggattacaggtgtgagccaccgtgccggccccctcaattcaactttttgatccatgcccctattttgctaagttgtcaacttccctttagtcttatgtgggttttcctccattacagtcatggaagtttctagaaggccgggtagggtctttgagaggccgaggcaggtggatcatgaggtcaggagttcaagaccagcctggccaacatggtgaaaccctgtctttactaaaaatacaaaaattagccaggcgtggtgtcggagcctgtaatcccagcttacttgggagggtgaggcagagaattgcttgaacctgggaggcggaagttgcagtgagctgagattgtgccactgtactccagcctgggtgtcagagcgagactgtctcaaaaaaaaaaaaaaaaaagtttctatacattcataaagtttcaagatttgggggtgtgttttcacttctccatcgtcatggactccaatctgccatctatttccaaggcccttccaggtcctgtgtccctcagctagtggtatgcttcacttgggacccagagatacatgggcattatagttcaaattataattaagtttagaactctattgagacagaagaaagaaaacagagctaaggtgaaatatctctgataatctgtgttggttaatatctaggatcctagtaccagatatgttggagtgtgagctggtgtcttctgcctgtaagacactacctctctagcaactgaatttagcaaatacaatcgtaatcccagcatgttagggaggccagggtgggcagatcatctgaggtcgggagttcaagaccagcctggccaacatggggaaaccctgtctctactaaaaatacaaaacttagctgggtgtggtggcacgcgcatgtgtgtacacacacacacccccctgtaatcccagctactcggaaggctggggcacaagaatcgcgtgaaaccaggaggcggaggttgaagtgagccaccgtgccagctgagaatcctttttacttctccaacttctgttggccacctgcattccttggcttgtggcccttcctccaacttcggcagagcatcttcaaacgttgccctggctcccttatcacgtcacctcctgctggctttgactctcagctccctcttatgaggatccctgtgattgctggacctacccaaataaaccaggatataaaccatcttaagatgctcagtcacctctacgaggtcccttttgctcgcaggtgccaggagttgggacttggacatctttaggggaggccattcttctgtccaccacaccaccccatgattccatttccatgtcaccactgtctctaagtgtgtctaacccacggctcaagagtcaaaggtgcatcacagcagtgagaactcacaggttcgggtttgctttcttcctgtggttgatttctaggctttggaactgcgacataactagcgatggctgctgcgatctcacaaagcttctccaagaaaaatcaagcctgttgtgtttggatctggggctgaatcacataggagttaagggaatgaagttcctgtgtgaggctttgaggaaaccactgtgcaacttgagatgtctgtggtgagttaacttataagttcaacttcctatacttacaccttactgaatctgtggctagtgtaaaataatcagtgaagccgacttcccaagttatataattgagaggacctttatagagtcgatcgagcatttactaggatggttaaaggaataagttctagtctatgtctaagtttttgtttttttttttcttgaagttttgctcttgtcacataggctggagtgcagtggcgtgatcttggctcactgcaacctccgcctcccaggttcaagcaattctcttgcttcagcttcccgagtagctgggattacaggcgcccgccaccatgcccagctaattcttgtatttttagtagagacagggtttc[140 bp omitted]tgtgaaattttaaggatacagtgcctcaagccattcagccaaaagccactgcccagcaccccacattcagagaggtgggaattgggccaggcacagtggctcatacctgtaatcccagcacttcgggaggccgaagcgggcggatcacttaaggtcaggagctcaagaccagcctggccaacttgaaactccatctctactaaaatataaaaattagccgagcatagtagtgggtgcctcttttttttttttttttttttttgagatagtttcactcttgttgcccaggctgtagtgtaatggcgcgatctcagctcactgcaacctccacctcctgggttcaagtgattctcctgccttagcctcccacatagctgcaaataaacaggcatgtgccaccatgcctggctaattttgtatttttagtatagacggggtttctccatgttggtcaggctggtctcgacctccggacctcaggtgagagccaccgtgcccagccagtaggtgcctttaatcccagctacttgggaggctgaggcaggagaatcacttgaaccctggaggcagaggttgcagtgagctgagatcctgtcactacactccatcctgggctacaagagcaagactccatctcaggaaaaaataaaaaagaggtaggaattagatatcgtgccagaaaatgctggctctatcagcaggtgagtggtctcaacttggctatcttacaaataccttgtgagttagctacaatcagatgcacttgaacctggaatcctatctgggaggcaatcttaaaagaatttgactcgggatgggcaaggtggctcatgcctgtaatcctggcattttgggagtccaaggcaggtagattgcttgaggccaagaatttaaaaacagcctggccaacacaatgaagccctgtctctactgaaagtacaaaaatccgctgagcatggctgtgtacctctgctcccagttactcaggaggctgaggtgggaggatcacttgagcctgggaggaagaagttacagcgaattgagatcacgtcacctcactccagcctgggtgacagtgagatcctgtctcaaaaaaaaaaaaaaaacaaaaaaaacaaaggcgcctttttaatcactcactgacacgtgtagaggagcaaaaagtttgagttgctggttggcccaggaggtcaaggctgcagtgagccaagatggcgttaccacactccagcctgggcaaccgagtgagaccgtgtttcaaaaaataaagtggcagggtgcagtggctcatgcctgtaattccagcactttgggaggccgaggcaggtggatcacctaaggtcaggagttcgtagaccagcctgtctctactaaagagacaggtgaaaccctgtctctctaaaaccacaaaaatcaggcaggcatggtggcacatagctataatctcatctacttggaggcacgagaactgcttgaatccaggaggcagaggctacagtgagccgagatcatgccacagcactccagccctggcgagagagcaagactgtctcaaagaataacttcaaagatggaagttatttaacctctctgctcaaaagcctcagtgcttccctatgtcaatccaggtaaaatcctatattgacgatggcttcagggtcttctgtgagctggccactgcttacctatgacctcatcttgacaatcctccctgtctcactcatgcccgctgcctggatgttctattttacgtgtcagtcacatgtatcttcagggcctctgcacaagctatttctctgcctggagaactcccccccgagctctatgactcggtctcttcaccccctcacctccaaccattgtagccagaacccccagttattccctgtaccccttgcccttcagaacccctcatcgcctccatattttcctgttagcagatgagccctgagggcggagacgttttgtttgttttttgagaccggagtctcactctgtcacccaggctggagtgcaatggcgcgatctcggctcactgcaacctccgcctcctgggttcaagcgattctcctgccccagcctcctgagtagctgggattacaggtgcctgtcaccacgcccagctaacttctgtatatttagtagagacacggtt[136 bp omitted]acgagggtgggcttggcttgccggagggcatcgatcagcactggctgcattaacgtgttgatttctgtgtttccccaggttgtggggatgttccatccctccgttcagttgtgaagacctctgctctgccctcagctgcaaccagagcctcgtcactctggacctgggtcagaatcccttggggtctagtggagtgaagatgctgtttgaaaccttgacatgttccagtggcaccctccggacactcaggtatgatccatttacttccccatcaggctttctccagagtggtaggtttaggggaagcataatgacatggacctgctgtaggagactgatctggtagctggattacaggttcccgccatcacacccagccaatttctgtatttcacttggagaaacggggt[142 bp omitted]ctatgttccccaggctggagtccagcagcacaatgatggctcgctgcaggctcgctccagctcctgggctcaagcaatcctgcctcagttcctgagtaggtaggtttataagcatgaaccattgcacccagccacggctgccgtctacctgctcatgatagccatttgtcactgggctgtgttttgtttgttgcattttgtcagggttttggggttttgttttgttttttctttctttttttttttttttttctgagatggagtctcactctgttgcccaggctggggtgcagtggttgctaactgcaacctccacctcccaggttccagctattctcatgcttcagcctcccaagtagctgggattacaggcatgcaccaccacacctaggtaatttttgtatttttagtagagacagggttttgccatgttggccagggtggtctcaaactcctgacctccgtgatttgcccacctcagcatcccaaagtgctgggattacaggcatgagccaccgcacccggcctgagttgtattttgataccatggcatcaaagaaccaagaagccccttcctaggaatgtgggaacttcagaaattctcacaagcaatatactctactgctggcttaaaataatctttatgtagaagaaacatagattacttgtttatttaacatgaaactcagcctaagatactttgtaagtcaaaagacatatggacactaagggtttttttaagctttaagtttgtttgtttgtttatttattatttattttggagacagttttactcttttttttggggtgcatcttttttcttttttttttttttttttcctttttttttttttttttttttattgatcattcttgggtgtttctcacagagggggatttggcagggtcataggacaatagtggagggaaggtcagcagataaacaagtgaacaaaggtctctggttttcctaggcagaggaccctgcggccttccgcagcgtttgtgtccctgggtacttgagattagggagtggtgatgactcttaacgagcgtgctgccttcaggatctgtttaacaaagcatatcttgcaccgcccttaatccgtttaactctgagtggacacagcacatgtttcagagagcacggggttgggggtaaggtcacagatcaacaggatcccaaggcagaagaatttttcttagtacagaacaaaatggggggctgacccccccacctccctcccggacagggcggctggccggttagaggggctcctcacttcccattaggggcggccgggcagaggcgcccctcacctcccggacagggcggctggctgggcggggggctgacccccccacctccccgcccggccagagttttactcttgttgtccagcctggagcgcaatggcgctatctcggcttactgcaacctccgcctcccgggttcaagaggttctcctccctcagcctcccaagtagctgggactacaggcatgtgccaccacacctggctaatcttgtatttttaatagagacagggtttctccatattggtcaggctggtctcgaactcctgacttcaggtgacccgcctgcctcagcctcccaaagtgctaagattacaggcgtgagccaccatgcctggcctgcatctcctctgtttaactggtactccggggtccactgagtagaagttgccaaagtgggtgatagagcgggtaagcaggtattagagctatagcccagctgtactcagcaattccattttctgtgtatgataatcaacaagcatctcaaactgcacaatggctatataccattacaaggttaacctgatgttatgtttttctctatcagatcaacatggttgagaataagaggaatgaaaaaaaggattaaaaagagaaatgaaagtctttaatattacattttattatttacttcatttattttttagacaaaaatctcactctattgctcaggctggagtgcaggggcccgatctcagctcactgtaacctccgcctcccaggttcaagtgattctcctgtgtcagcttcctgagtagctgggattatagggatgcaccatcacacccaactaacttttatatttttagtagagatggactttcaccatcttgcctaggctggtctcaaactcctgacctcaagtgatctgcccacctcactctcccaaagtgctggcattacaggcatgacccaccacatctggcctcattttatatttaaaaataaaaaataagcaaatcaagccaggtacagtttaggcaacatggtaaaaccccaactctactaaaaatacaaaaattagctgagcatggtggcaggtgcctgtagtcccagctactcgggaggcagaggataggatggcttgaacccaagaggcacaggttgcagtgagctgagatggtaccactgcactccagcttgggcaacagagagactgtctttttttttttttttttttttttttttttttttttttttgagatcgcccaggctggagtacagtggcacgatctcggctcactgcaagctccgcctcccgggttcacaccattctcctgcctcagcctcctgagtagctgggactacaggcgtccgccaccacgcccggctaattttttgtatttttttagtagagacagggtttcaccgtgttagccaggatggtcttgatctgctgacctcgtgatccacccgcctcagcctcctaaagtgctgggaattacaggcgtgagccatcacgccccacctgagactgtcttttaaaaaaaaaaaaaaaaaatcaatgtggaacactcctttgccacctagaataatcaggaaaggtgacccatgccctgtgcctccttaacagactttcaggtacttgggaatttgaaacaaatctccttgatgcacaaagtaaccttttcttcccccattgtaccccaggttgaaaatcgatgactttaatgatgaactcaataagctgctggaagaaatagaagaaaaaaacccacaactgattattgatactgagaaacatcatccctgggcagaaaggccttcttctcatgacttcatgatctgaatccccccgagtcattcattctccatgaagtcatcgattttccaggtgttggtgaactgcctgtgactcctctcctccccggcccctacccctcagggataatgagttcattgctgggctagatgttttagccatgattctgcctctgttttatacctgcacacatccttatctttgttacatatgaaatatctgtatcacgggtatattgagagaaataaaggtgagagcattcacaaatgaagctgttacttaataatgggctttgacaagttagagaaaagatatcttactgggtagaacctggggggtgggggaagtgacagtgtttaattgcattgatttctattgccttgtcaatctttgccttgccttggtatttcctttcttttttcttttctttttttttttttttttttttagactgagtttcactctgttgcccacgctggagtacactggcacgatctcagcttactacaacctggcaggttcaagcgattctcctgtctcagcctcctgagtagctgggattacaagcatcccccaccacacccggctaaatttttttgtatttttaatagagatgaggtttcaccatgttggccagtctggtctcaaactcctgacctcaagtgatccacccacctcagcctcccagagtgctgggattacaggcatgagccactgtacccggcttttttttttttctttttctttttcctcaagcatgagtgttgctctgttgcccaggctggaatacagcagcatgatgatagctcactgcagcctcaagctcccaggttcaagcgatcctccagcctcagcctcctcagtagctgggactacaggtgcacaccaccaaaccaggccaatttttgtgggattttttttgaagacagggtctcactatgttgcccaggctgatctcaaactcccaggcgcaagtaatattcctgcctcagcctcccaaagtgctaggattacaggtgtgaaccactgtgcctagcctgtcttgttacttgttgacctgcgtggatcactgcctgctgagtattacttgccagaggatttctcctaccaatctacaatattttaggtgcttcggtgtagctcatatatgaccatgtcattgctctgattttgctttttaaaaattctaacttaaaatagaatctcggccaggcacggtggctcacacctgtaatcccagcacttcgggaggctgaggtgggtggatcacgaagtcaggagttggagaccaacctggccaacgtggtgaaaccccgtctctactaaaaatataaaaaattagccaggcatggtggcacatgcctgtaatcccagctacttgggaggctgaggcaggagaattgcttaaacccaggaggtggatgttgcactgtgctgaagactgcactactgcattccagcttgggcaacagagtgactccttctccaaaaaaaaacaaaatctcatggtatgcatagtttttcactatagagtctccattatttccttgtgatacagaattccaaattcaacaaagcagcagtgcaagctctacgctgtaaaaccacaaacaaaacgaactgtactataaagacaacactagttggcaaagttgcttctcatggggagactttgttgctgtctgtgtttactggatgagcaaacaaatggacggtaagggggaaaaagaacagtacaaatttttattaaacactaatcatgtttttttttgtttgttttgagacagtttcttcttgttgcccaggctggagtgcaatggcacgattttggctcactgcaacctccgcctccccgggttcaagcgattctcttgcctcgacctactgagtagctgggattataggcatgtgccaccaagcctggctaattttgaatttttagcagagacggggtttttccatgttggtcaggctggtctcgaactcccgacctcaggtgatccaccagccttggtctcccaaagtgctgggattacaggtataagtcaccgcacctggcaacatttttttcttttttttttttttttttttttttttttttggtggcagaatcttgctctttcacccaggctggaatgcaatggcacgatctcgggtcactgcagcctccacctccccagtttaagcagttctcccatctcagcctcccatgtagctgggaccacaggtgtgcaccactgcacccaggtaatttttgcatttttggtagagatagggttttgccacgttgtccagactggtcttgaactcctgagctcaggtgatctgcccaccttggcctccccaaatgctgggattataggcatgagccaccacacctggtcaaaagtagttttaatatttaaatttaaaactaaaaaagttaatctctcttcctactttcatttcttcatcaggggctattggtttattcccaccgactagatccaagttctctgatactacctttaaaccactccatcactttccagttccactgcatacagtgtgggcttctgaggtttcctggttcaaggtgtccttgttcaatgcggcatgggtcattccctgagcatttttttttttttttgacagtctcgctccattgcccggtttggagtgcagtggtgtgacctcggcttactgcagcctctgcctcccaagttcaagcaattctgcctcaggctcccggataatttttgcatttttagtagagacagggtttcaccgcgctggccaggctggtctcgaacccctaacctcaagcgatctgcctgcctcggtctcccaaagtgctgggattacagacataagctaccgtgcccggcctccagagcatctttattctcagtttcagcgggaagaagggggaaggttggtaaaaagagaggcacaaagtttaaaaaggacattgcgtgaagaaactaaaggtttctccttctccacactattgacatttgggatcggatcactactcgttgggaaacgtcctgtacatttccagggtgttcggcaccatccctagcctctaccccctagataccagctcacatcctcacagttaacagtgatcaaaaatgtctctgggcagtagaaaatatttcctgaaatgcaaagttttcttaggttgagaaccattgtaatctagccccatctttagagaagaaattgagtaacggatctacatccattgaggaactatcgacaccccaggggcccatgaaatgtaaactcgcactcacaattaaccatctttctccaacgtgtgtatttcatgtagccacactctcagatgcccacccccatgacctacaagtcctaaacagggaaacctgtggcacatgggttcatgtgtgtctgaatctatacgttcagagatgaacaagtactgctctccctatacctgtgaccactcgcctccgcccatcactgaattctgaaaatgtggcctcaggctcacagcagcattagcacttgcttgctctggatctcatcacattgatgatcaagaacaaagtattcactgggttctctgctaaggatacaaaaaaaaccattccacaattccacggccatgtttgcacccaggaaccacgagggctgggttagcccagatggtgggcttgggaaatgttcctggagcaaaaaaaagagccagaagtcatgagagcctgaccccctcccccaacgcgcacacacacacaccactctctacctccaagcctcattttcaggcttctcaaagctaaggtcactcccatgagctaagccgcgcttttctcaatcctcagctcttccacaagaataggaagaactctctcctgttcaagatcctgtggctcagctgcagctctggaagaaagaccccggtgagggtcttgcttttcacaatccccaatcccagaccacatcctgtgccccaaaacaacttccatggtaaccacatccttcaggaagtgaagtcaggcaggaagtcaagtcagaagacggaatgggctgggcatggtggatcgcacctgtaatcccagcactttgggaggcagaggcaggtggatcacatgaggtcaggagtttgagaccagcctggccaacatggtgaaaccctgtctctactaaaaataccaaaagtagccaggcttggtggtgcatgcctgtaatcccagctactctggaggctgaggcaggagaatcgcttaaacccggaaggcggaggttgcaatgagccgagatcgcaccattgcactccagcccgggggacagaaaaaaaaatgtagctgagcatggtagtgcacgtctgtgatctcagctacttgggagtctgaggcaggagaatcacttgaacccaggcggtggaggttgcagtgagccaagattgtaatagtccaatgtgttcaccttgcccactgcctagacagagctgattcgtcaagacagggaatcgcaatagagaataattcatgcagagctggctctacgagagaccagagttttattattattcaaatcagtgtctcccagcattcaggaagcgtttttaaggataacttggtgggtgggtgggaagccagtgagccaggagtgctgtttggtcagggatgaaatcgtgggagccaaagctatcttcttgcactcagttcctgagtggaggccaaaagataagatgggccagtttattgatatgggtggtgccagctgatccatcaagtacagggtctgcaagttaaacgctgatcttagaagcagtttagggagggtcacaatcttgtagcctccagctgcatgactcctaagtcataatttctaatctcgtggctaatgttcgtcctacagggccaatctagtccccaggcaacaaagaggtgtgctttggaaaagggctatcatctttgtttaaactataagtttctcccaaagttcagcctatgcccaggaatgaaaaaggacagcttggaggttagaagcaaaatggagtcagttaaatctctttcactgtctcagtcataattttggaaaggtggtttcaagctggcacaactgcactccaccctaggagacagagcgagaccctgtcaaaaaaaaaaaaaaaaaacaagaagtgaagtcaagataggaggtaaattcggaagacaggaagtggtggtagaagacaagaagtgaagtcatacaggaagtaaagtcagaagacaggaagtgaagtaagaagacaggaagtggttgtagaagacaggaagtgaggtcatacaggaagtaaaatcagaagacaggaagtgacgtcaaaccaggatttgcagtcggaggcaggcaagaagtgaaatcagaagacgggaagtggctgaggggaacgtcttttctctctcctgctcagcccgaagtgaacaggtagcatcaggtgtgccatttcagtgactgggcacagcccaggcacccacatctctctgcagcgcctattcttggaacaccagagacctctacactattttctgttgcttttttccttcattttcagagatgagatcctggattgaatgactactatggaaagtgattgaccaaggtaagtcacaactatcttgttctttaattttggtgttgtttgttatgacttgttagccgtctagcactcatagctttgcatttccactctgcattacttgtatttttattattttgtgatattcgtaataatttattataaaactgtgttatttttggatatttttaagttaaaatgcgattttttaactaagtggcagtatgcaaagcaagtggttcagaactctcccccattaataagtcttctctcctgaaagaaacaattttgagacttcctgttcttaattctgtttaacagcatacttctaaaagaaaaagtgtatactgttattatttattgtgttacaaaaatatacacgcacctttcatgcacgtccgtgtgaagagaccaccaaacaggctttgtgtgagcaataaagcttttaatcacctgggtgcaggtgggctgagtctgacaagagagtcagcgaagggggataggggtggggccgttttataggatgtgggtaggtaaaggaaaattacagtcaaaggggggttgttctctggcgggcagagtcggggtcataaggtgctcagtaggggagcttttgagccaggatgagccaggagaaggaatttcacaagacaatgtcatcagttaaggcaggaacaggccattttcgcttcttttgtggtggaatgtcatcagttaaggcacgaaccggccatctggatgtgtacgtgcaggtcacaggggatatgatggcttagcttgggctcagaggcctgacattcctgtcttcttatattaataagaaaaataaaatgaaataggggtaaagtgttgggacagcaaaaatttttgggggtggtatggagagataatgggtgatgtttctcaaggctgctttgagcaggattaggggcggcgtgggaacctaaagtgggagcgattaagctgaaggaagattttgtggtaaggggtgacattgtgggattgttaaaagaaacatttgtcatttagaattattggtgatggcctggatacagttttgtatgaattgaaaaactaaagggaataaggaaaggagaaaaacaggtattaaaggtctaagaattgggacgactcaggacatctaattagaaagtgcctaaggaggttcagcatagccttgccagcaaagattatttatttattttaagagttaacagtggcggtatggggatagtaccaggagataccagctgtgctggcttggagaaacagtgtaaactggcagtgtaaacaagagcagggcatgtgtgagtagttgagaacggtgaataggagtatgactagacagaagatagtagggatgacaagttttttggggcacaatctaagttggtctggtgtctggaatgagactggggcctaataaaaaggagtgtctacacaggagcttaaatgggctgtatcttgtagcattccaaggacaggcctgaattctggaagcgaaaatggtaaaagtattgtccagtcctttttaagttggtggctgagcttggtgaggtgtgtttttaatagaccattagtctgtcactgaatactaagagcctgaaaaaatgcttggctgatttgactaataaaggctggtctgttagcagactgtatagaggtgggaaggctgaactgaggaattttgtctgacagaagggaatgacaaggctaaactgaagaattatgtctgacagaagggaagaaatgactgcggtggccttctcagaccctgtaggaaaggactgtacttacccagtgaaagtgtctacctagactaagaggtattttagttatcttactcggggcatgttgagtaaagctaatttgccagtcctgggcgggggcaaatccttgagcttgatgtgtagggaagggagggggcctgaataatccatgaggagtagtagaatagctgatgcaacactgagaagtgatttctttgaggatagatttccacaatggaaaggaaatgagaggttctaagaggctggctagtggcttgtaccatagcatagcctgcctttgctggtgtgtggcgattaggcctggtggaaccgccatcaataaactaagtgtgatcagggtgagaaacagggaagaaggaaatgtggggaaatggggtgaacgtcaggtggatcagagagatgcagtcatgggggtcaggtgtggtatctggaataatgtgggaggccagattgaagtccgggccaggaacaatggtaattgtgggacttaacaaagagtgagtacagctgaaggagccagggagcagaaagtatatgcatcaggtgtgagtaagaaaatagattttggaaattatgagagctgtagagagtgagttgagcatagtttgtgattttgagggcctctaaaagtattaaagcagcggcagccacagcacgcagatatgagggctaggctaaaacagtaaggtcaagttgtttggacagaaaggctacagggtgtggtcctggctcttgtgtaagagttctgaccgcgctaaccatgcctaggaaggaaaggagttgttgttttgtagaaggtgctggggcttgagagatcagtcagacacgatcagcagggagagcacgtgtgtttttatgagaattatgccgagataggtaacagatgaggatgaactttgggcttgactgaagtaatgggggctgtctgtgaaaccttgcagcagtacagcccaggtaatttgctgagcctaatgggtgtcagggtcagtccaagtgaaagcgaagagaggctgggacgaggggtgcaggggaatagtgaaaaaagcatctttaagatcaagcatggaatagtgagttgtggaggaaggtattgaggacaaaagagtgtaggggttgggcaccacagggtgcataggcaaaacaatttgataaggcgcagatcctgaactaatctgtaagacttttccggtttttggacaggtaaaatgggggaattgtaaggagagtttataggttttagaagcccatgctatagcaggcgagtgataacaggctttaatccttttaaagtgtgctgtgggatgggatattggcattgagcagggtaagggtgattaggttttaatgggatggtaacgggtatgtgatcagttgccagggaaggagtagagatgtcccatacttgtgggttaaggtgggggaataggagaggaagacgcgaaggaggctttgggttgaggagaagggtggcaatgagatgcggctgtagtccaggaatagtcagggaagcagataatttggttaaaatatctcggcctaataagggaactgggcaggtggggataactaaaaaagagtgcataaaagagtgttgtccaagttggcaccagagtgggggagttttcaggggtttagaagcctggccgtcaatacccacaacagttatggaggcaagagaaacaggcccttgaaaagaaggtaatgtggagtgggtagcctccgtattgactaaggcgacggacttaccttccaccgtgagtgttacccgaagctcggcatccgtgatggtctacagagcttccgaggcgattgggcagcatcagtcttcagccgctaagccgagaaggagtcagagagccttgggccagagttccaggggctctgggagtggctgccaggtgagttgaacagtccgatttccagtggggtcccgcacagatgggacacggcttaggaggaatcctgggctgcaggcattccttggcctggtggtcagatttctggcacttgtagcaagctcctgggggaggaggttctggaggaacgcctggccgctgcggttcagttcccttcttgtgtgctggagatgtggctggggtttgtctcacagtggaggcaaggaattgcaacttttttctattattgtacaccttgaaggcgaggttaattaaatcctgttgtggggtttgagggccggaatttaatttttggagttttatttaatgtcgggagcagattgggtaataaaatgtgtattaagaataagacggccttttgacttttaagggtctagggctgtaaagcttctcagggttgctggcgaacgagccatgaattgggctggatttttatatttgatgaaaaagagcctaaacactatctgatttgggataaagaaaaaggagcattaaccttgactatgcctttagctccagccacctttctaagagtaaattgctgggcaggtggaagagggctagtcactgaacgaaactgtaagctggaccaggtgtggggaggggaggtgataaaaagataatacggtggaggagcggaggctgaggaagaattgggacctagctcagcctggggaggagggagaggtcagacgggtctgtagaaaaggaagattagaaagactcagcgacgcttggggttgagactgaggggacaggcaggagggaaagaaggaagatttgggacgagttgcactgggcacagagactaggaagggactgatgtgtaaaagaatgcctggacgtcaggcacctcagaccgtttgcccattttacgacaagaattatttagatcttgcaggatggaaaaattgaaagtgctgttttctggctatttggaactgctgtccagtttgtattggggtcaagcggcattgcagaagaaaataaggcatttaggttttaggtcaggtgtgagttgaagaggttttaagtttttgagaacacaggccaagggagagaaggaggaggaatggagggtggaaggttgcccatagtgaaggaggcaagcctagagaaaagagagagtagagacacggagggaaggggttcgggagttcttaccttccagaaaagcgggaaaggggttggggcatggatataaggggttggggcacagagataagaggttggggcatggaaataagggatcagggtgcagagatacgaggttggggtacttgcccctctagaaaagcgggacttgccgctaagagtgaaggagaaggggttgggggtttcttgccccccagaaaggtggagaaggggtagagacatggagaggaggggttggggaacttgccccttccccagaaaagtgggacttgccactaagggtgaaggaccaaggcaggcatccctgcgtgatctgacacctctgaagcgtgggtatataatcagagaggcgtccctgcaatgattaaacgccaagggaaggctgccttccctagtccgtgaccggcgccggagttttgggtccacagataaaacgtgtctcctttgtctctaccagaaaatgaaaggaattgaaattaagagaagggagagattgaagagtggaaaggagaaagtggttgagggacagtgagagaggttggagaagagagtaagaagaggtcgcttacccaatttaaacttggtgagatgttccttgggctggtgggtctgaggacctgaggtcgtaggtggatctttttcacagagcaaagagcaagacaggggattgatctcccaagggaggtcccccgatccaagtcacggcaccaaatttcatgtgcgtccatgtgaagagaccaccaaacaggctttgtgtgagcaataaagcttttaatcacctgggtgcaggtgggctgagtccgacaagagagtcagcgaagggggatggggtggggccgttttataggatttgggtaggtaaaggaaaattacagtcaaagcggggttgttctctggcgggcagagtgggggtcacaaggtgctctgtaggggagcttttgagccaggatgagccaggagaaggaatttcacaagacaatgtcatcagttaaggcagtaacaggccattttcacttcttttgtggtggaatgtcatcagttaaggcaggaaccagccatatggatgtgtacgtgcaggtcacaggggatatgatggcttagcttgggctcagaggcctgacagcacctacctaaaaaattccaatagcactaaaagggtgtgtacaaaatgcagtggctgactaaccatctcctccattgctccgcctaagagacacccacttttagctgttttctttaggaacttgttaatattaggtttctaaaaacatgtaaccatgtgaatgagcttagacttactggattcctatcataataggcggggccttagttattctacagcgttgttcttactgttttttctcttccaatgtttatctctatgtctgcatatcaacattcagtatcacattttttttttttgagacagagtctcactctgtcacccaggctggagtgcagtggcgcaatctcagctcactgcagcctcagtctcctgagtagctgggactacaggcgtgtgccaccacgactggctaatttttgtatttttagtagagacagggtttcaccatgttggctgagctggtctcgatctcctgacctcgtgatctgcccacctcagcctcccgaagtgctgggattacaggcatgagccaccacgcccggccagtatcacatgtttatacccacagatattcgcagccgagaattttcgggtaatataacttgcttcttttatttttgttgttgttattgttcccctaaagtttatatttgttttttatttttattttcttttgaggcagggtctcactctgtcacccaggtttgacagcagtggtgcaatcatggctcactgcagcctcaacctccccgggctcaggtgatccccaacctcagcctcctgagtacctgagagtaggcatgtggtaccacacccagctaattttttatattttttgtatatgagacaaggtttcaccatgttgcccaggctggtctcgaactcttaggctcaagcgatcccgcctcagcctcccaaagtgctgggattacaggtgtgagccactgtgcctaggctatactggtctttttaaaatctacttagtttacttgacctctaaaattatttttcctctgtcttctgatagcatctcagtatgattttccactatgttaagacgaggaattgacccattcttacatttggaggcttctctaagcaactttcccattcccccttcacccaagctgtgtgctcactagccctgattcacagccgtcgtcctggaacttcttggtgccatccttctgtcttttcccaagtgactcacctacctcaacctcccaaagtgccgggattacaggcgtgagccactgtggccagccattcttttccttttttaaaacaatttttatcttctttattttaagtagagatggggtctcactatgttgcccaggctggtcttgaactcctgggctcaagcgatcctcctgccttggcctcccacagtgctaggattacagacatgatccactgcacttggcccagtggtacagttttacactcattagatggtcaagaaatgcctaaacgctataataaatatagaactttaccttgagaagacctaacatttccttcagaaagtaaatatgagaggggtggagacggtgcattatcttatttttatgattttaaaaatgtatacagaattgtacatatttatggggtggacagcaatattgcagtacatgtatacaacgtgctatgatcaaatcagggtaattgacatattcatccctgtattttttgagacaaagtcaggcttcgtcacccgagctagagtgcagtggtgtgatctcagctcactgcaacctctgcctcccaggctcaagccattctcccacctcagccccctgagttgctgggagtatagggatgcaccaccacacctggctaatttttgtgtttttttgttttgttggtagagatgaggtttcaccatgttgcacaggctgatcttgttttctaatgtgaagggaagcgggcaacgtgctagttttacactaaggaaaatgaatgacatacccaaactgcctgcaagacccgttctgagagacgaaaggagatttgttagaccgcagtgggagatggagtgagggtgagagtttctggggaaaaccagacaagagcacagagggccaaagggaagcacgggaggattttgcacagaggatggaacagagtcaaccctgagagctgggaaccttagagatccgtctggagcccatattagagaggttgaagaaagaggccagtatgtggtccagccagggtaccatgtcatccacagtgtgcagggaggaggatggggtctccacagattccttccatcccaaatggagggtgccctcagacagagaggcagacagacagacagacactggccgaacggctccctgatggaacaccaggaggaggcagcatggcctcgtttccacagctgtagcctctgccctcctgcttccacgctccacacacgccagtctttgagtcgcctcccatgccatgatccctcccttggatacgaccgtgcctggggttcagcggtcatgaacataacccgcggctgtgaacatcctgtcggcctccatcctgacccccgtttgatttccgggtcagcgggaggggcgggaggggcggaagcggcctctgcacagccctgcccctgtgccgcaggcgcttcctccggctgtgccagtcctctgccagaaaccccgccaggattattaggatcacagccccgaggcatatccggaccaggttgcccttggtgtagtactggcgggcaggacctggaggaatgaggagaggcaggagcaggtgaaagagcccacctccaggaccccctccaagccacatctgggcttctcagagatcctattattctctactagctaggggatgccgctcactttcctggagggtccctcccttcccgagtaggggtcagggccagatgaccccaattctctaagtagcacctctccctcctgtgctctcacagggctctgagacaactcctccccagacacagatgctgcctcgttatctgatgcattgcaaaagagaggacagttataaggggtggggaagagatggaatctctctttctctgaccctttttaaaatctcaaccttcccacctgatcttaatgcccaattctgaaccccatacgctgatattctgcctttactctacacactggaacccaagatctgagagctgcagcccctgcgtagacaaaggagttggctttggtgaagagacgggtgagaaggaagggggtctggagaggatgacttactcaccagctggagagtctgactcctttggactggcggtgatactcctagaagtctctgggaaccaaacaaaggctaagtgtgaaatgaaaccatattcccgccccctgtcactgtgcctactccgaacacacacacacatggggaggcacaattccacagcatttaagaaaagcatgggccgggcacggtgcctcatgcctataatcccagcactttgggaggctgaggtaggaggctggcttgagtccaggagttcaagaccaacctgagcaacatagaaaaaccctatctctacaaaaaaatacaaaaattagccaggcgtggtggcacgtgccagtaatcccagctactcagtggaggctgaggcaggaagatcacctgagccctgggaggttgaggctgcagtgagccaggattgtaccactgcactctagcctgggaaacagagcgagaccctgtccaaaaaaaaaaaagcaagaactgtagagtcaggctgtcctccagatttgaaccccaactctatcacctattagatgtcagttatctggcaagtgactcagcatctgtgagccagttccccatgtgtccaataaaattaacaagatcccttataggttgatgtgaaagtcaagataataataatggtagaaatataaagcaccgtgcttgacatatgagcacctcatacgtgccagcttttttttttttttttttgagacagagtctggctctgtctcccaggctggagtgcagtggcccgatgtcggctcacttcaacctccgcctcctgggctcaagcgattctcctgcctcagcctcccgagtagctgggactacaggcgtccgccaccacgcccagctaagttttgtatttttagtagagatgggatttcacc[137 bp omitted]caggtactcagccatgtgctgggccatgggaacccaaatattaataagacattgtcaggccaggcatgacactggctgaatgcctgtaatcccagcactttgggaggccaaggtgggcggatcacctgaggtcaagagatcgagaccatcctggccaacatggtgaaaccccgtctttactaaaaatacaaaaaatagctgggcatggtggcacacacctgtagtcccagctactcaggagccggagattgcagtgagctgagatcgcagagtgagccgaaatcacagatcacagagtgagcagagtgagactccgtctcaaaaacaacaacaaaaaacaaaaaaaccataagacattgtccatctgcggttcccagactattgcaggagaccaaaaagtaaagcgatttttttttttttttaatacggagtctcactctgttgcccaggctggagtgctgtggtgtgatctcaggtcactgcaacctccaactcgtgagttcaagcgattctcctgcctcagcctcccaagtagctggaattacaggtgcccaccaccacgcccggctaatttttgtattttcagtagagacggggtttcagcatgttggccaggctggtctcctgacctcaggtgatccactcaccttggcctcccaaagtgctgggattacagacaaagcgataattttaatatactgtaaaaattgctgtaataggcagcccacaagacactgagcgagagcagaggaaaccatcgatccagcctggacggtcaaggctttcttgaggaattgatgccatggggaaatggaagaaaaggcagagtgagtgggttgggtgcagagtcaggagaggttaggaagcctccaggagagcttcaagtgactgtgtgtggctgagaacagcatgggaatgcgtggaaggtatgcagacaaaattggagggatcaacaggggctggatatctaagctcacagaatagcaagctgaggaattggaactgcatcctgagggtgattgggaggttccgaactgaagatagggaaggcttccatcacagaactccctgggatatgccgggcgcggtggctcatgcctccaatcccagcactttgggaggccgagacaggtggatcatgaggtcaggagttcaagaccagccttcccaagatgctgaaaccccgtctctactaaaatacaaaaattagccaggtgtggtggcatgcacctataatcccagctactcgggaggctgaggcaggagaatcgcttgaacccgggcagcagaggttacagtgagccgagatcgcaccactgcactccagcctgggcgacagagcaagactccacctcaaaaaaataaaaaatagaactacgtgggatcaggtgcctcatgaaagccagagtcatgtgggcccagtggaagtatctaacctattatcagggaatctgtgaaggtgtttagtctggaaggaaatggagattttccaggacaggcaaggggaaagagactgaggaaagcgtatctgcagaggcctggagcggttagaagatgtgctgtgtccaggtgcctacagtctgtgtgcgtccgagcatgggctctacctggacacagtgaggagcgagattaaatacctggatcacagccgagtccaaagcctaggacttcatcctgggagcagtgcgtagggatggcggtcgtcccgccacagccttggctccgccatctttgaaatggccccatcacccaaaacgctcctccttctgaaccccagagctccactctgcacccatgctctagcctcacaccaaggactttcttggtaagagacggacagttcggtgaagtgattaaaagcctacaggcttagataatggaagagagagctccgtcctcacactcctttctgctgagcatgaaatgcctggttactcaccagttgtgaagacttcgtttgtgaatgagacggtcagttcagcggtggcttctgagaattctaagaaagcaaaacaatgttaggtcttccccgtggttccctatatcctctagatatctccattccccttttgagatatctaggctccctgaaacccctttctctgacacactgcacagacactgaagacagacaaattcgaaaggtgtaagacttatcttccatgaccggcttagtaagaagcagatccgttcagcaattgatagacacttggttttttttccacgttttgctgttatgaatattgctgctgtgaacattgacgtacaggtttttgtgtgaacataagttttctgttctcttgggtacacacccaggggtggtggaatcactgggtcatacagtaactctgtgttttactttttgaagaactaccagacttctttcttttttttcttttttttttttttttgagacagagtctcattctgttgcccaggctggagtgcagtggcgcgatctcagctcactgcaacctccacctcctgggttcaagcgattctcctccctcagcctcccgagtagctgggattacaggcacctgccatcacgcct[139 bp omitted]tgtttttcaaagcagctgcaccattttatattcccaccagcaatataagaaggttcttccaaatcctcaccaatacttcttgtccgtttgttttgttttaaaaatcatagtcatcctagttggcatggtgaattttatggtatgtgaattatatctcagtttgaataataagatgtggatccatgtcttcgtgagcctagaggaagaatgagctcgtgttagcctcagaacacgggatctccaccttccaacttaggccattttctttttttctttttttttttttttttg[132 bp omitted]caccacgcctggctaatttttttgtattttcagtagagatggggtttcaccgtgttagccaggatggtctcgatctcctgaccttgtgatccacccgcctcagcctcccaaagtgctgggaatacaggcgtgagccaccgcgcccggccaggccattttcttaaccaggggcctcctgaggccaccaaaatattcctgaactgcctcagctgataaatacgaagctcttgttgcagtgggtactatcctgggagtctttttatggtggaaccagcttggaaaaaactagtttatgctcagctctcggtggcataatgagagtgtgggtattatttggtctttgttatttctcttcgtgtgagatgcattaataaaccttttttttttttttcaattaaaatttcagttccagaatccatgtgcaggacgtgcaggtttgttacataggtaaacgtgtgccatggtggtttgctgcacccatcaacccatcacctaggtattaagccccacacgcatcagctatttatcctgatcctctccctcccccaattccccctacaggccccagtgtgtggtgttcccctccctgtgtccatgtgatctcattgttcagctgccacttacaagtgagaacatgcagtgtttggttttcagttcctgtgttagtttgctgaggataatgttttccagctccatccatgtccctgcaaaggacatgatctcattcctttttatggctgcatagtattccatggtgtatatgtactgtatttgctttatcctttctatcattgatgggcatttgggttgattccttgtctttgctattgtgaatagtgctgcaatgaacatatgtgtgcatgtatctttataatacaatgatttatattcctttgggtatataaccagtaatgggattgctgggtcaaatggtatttctggccaggcgcagtggctcacacatgtaatcccagcactttgggaggccgaggtgggcagatcacctgaggtcaggagctcaagaccaccctggccaacatggtgaaactcccgtctctagcaaaaatccaaaaattagccaggcgttgtggcatgcacctgcagtcccagctactcgggaggctgaggcaggagaatcacttgaaccctggaggcagaggctgcagtgagccgagatcatgcccctgcaatccagcctgggtg[148 bp omitted]aaaaccccatctctactaaaagaaaaaaaaaaaaaaaagccaggcatggtggcaggcgcctgtagtcccagttacttaggaggctgagacaggataattgcttgaacctgggaggtggaggttgcagtgagccgagatcgcaccactgcactccagcatgggctattgagcaatactacatctcaaaaaaaaaaaaaaggaaaaaggatttctggttctgggtctttgaggaatcaccacactgtcttccacaatgaactaatttacattcccaacagtgtaaaagcattcctatttctccacagcctcgccagcacctgttgtttcttgacttttgttggttttttttttttttttttgagatggagtcttgctctgtcgcccaggctggagtgcagtggcacaatcttggctcactgcaacctccgcctcccgggttcacgccattctcctgcctcagcctcccgaatagctgggactacaggcgcccgccaccacgcccggctaattttttgtatttttaatagagacggggtttcaccgtgttagccaggatggtctcgatctcctgaccttgtgatctgcctgcctcggcctcccaaagtgctgggattaccggcgtgagccaccgtgcccggcgtttcttgactttttaataatcgccattttgactggtgtgagatggtgtctaaatgtggttttgatttgcatttctctaatgattggtgatgttgagcttttttttgtatgtttactggctgcataaacgtcttcttttgagaagtgactgttcatgtcctttacccactttttaatggttttttttttcttgtaaatttgtttaacttccttgtagattctggatattagacttttgtgaattgatagattgcaaacattttctcccattctgtaggttgtctgttcactctgatgatactttcttttgctgagcagaagctctttagtttagttagatcccatttgtcagtttttgcttttgttacaattgcttttgacgtttttgtcatgaaatctttgcccatgcctgtgtcctgaatggtattacctagattttcttctagggtttttatagttttcgggttttgcatccaagtctttcatccatcttgagttaatttttgtacaaggtgtaaggaacgggtccagtttctattttctgcatatggctagccaattctcccagcaccatttattaacccacagccaatttcatactaaatgggcatttcccttgaaaaccagcacaagacaaggatgccctctttcaccactcctattcaacatagtattggaagttctggccaggataatcaggcaagagaaagaaataaaggatactcaaataggaagagaggaaatcaaactatctctgtttgcagatgacatgatcctatatctagaaaaccccatcatctcagcccaaaagtttcttaagctgataagcaacttcagcaaagtctcaggatacaaaatcaatgtgcaaaaatcacaagcattcctatacaccaacaatagacaggcagagagccaaatcatgaaggaactcccattcacaattgctacaaagagaataaaatacctaggaatacagctaacaaggaaagtgaaggacatcttcaaggagaactacaattcactgctcaagaaaatcagagcggacacaaacaaatggaaaaacattccatgctcatggataggatgaatcaatatcgtgaaaatggccatactgcccaaagtaatttatagattcattgctattcccattgaactatcattgacattcctcacacaattagaaaaaactataaaattcatatggaaccaaaaaagggcccatatagccaagacaatactaagcaaaaagaacaaagctggaggcctcaggctcagacttcagactatattacaaggtgatagtaaccaaaacagcatggtactggtacaaaaacagacacatagaccaatggaacagaatagagatctcagaaataagaccacacatctacaaccatctgatcttcaacaaacctgacaaaaacaagcaatggggaaaggattccctatttaatacaccttgttttgattttgatttcaacacagcgtgtggtatttgcatgccatgtgatacagtttgaatatgtgttcccaccaaatctcatactggattatgatccccaatgttggaggtgggggcctggtgggaggtgtttggatcataggggtggatccctcattgcttggtgctttccttgcaatagtaagtgaattctcacaagatctggctattgcaaagtgtggcatgtcccccagtcccaactctctctctctcttgctcctgctcccaccacatgagacagctaccccctctttgccttctgccatgactgtaagcttcctgaggcctccccaaaagcagaagccagccttctgcttcctatacggccttcagaaccatgaaccaattaaacctcttttcttatcaatgatccagtctcagatatttatagcagcacaaaatcggcctaatatagcatgaaatattgctcagcaatcaaaaggaacacatcattgatacatacagcagcttggatgggcctcaggggcattgcactgagtgacaaaaggatatctcaaacggttgcatactggatgatcccatttacatcagattctagaaatggaagattatagagatggagaacaaattaatggataccaggagttagggatggcaagggaaggagaagggtgtaggtgtgaatataaaagggtagcccaagggaggcccttgtgagacggaagagttctgtacagtgactgcggtgatggtgacgcgaatctacaactgtgacaaattggcatagaactagacacctactttatgccaatgtcaaattcctggtttttatgttgtactctaattacgtaagatgtaaccattagaggaaactggaaaaagagcacatgggattcttctgttctatcattgtagacttcctgtgactctagaaccatttcaaaagagaaagttcaaaaattcagtcagaagcacacgcacacatatgcacgcatgcacacacacacatatgcacgcatgcacacacatatgcacgcacacacacatatgcacgcacacacgcacatgcacgcacacacacatatgcacgcacacagtatgtgaccatcttccatgtccctgcccactaggcataatagccctcactctgccctcaaccccgcaaatctcatccttatcaacctcggctctttccagcatgtttctcctgccttggtgcttcactctgagacacagggaatgttagacacgcccagcctccagcctagcgtatgatattcttaaagtgcaggccgtagtctggtacaccgtattcagctgagatgtttgtgaaagtggaggggataacacgcctcacacaaaacttaccgcagtggttctcaaagcagcattctggagccatagcatcagcatcacctgggaacttactaggaatgaaaatgactggattcaccccagacctactgaagcagaagccctgggggctcagaaatctattctttaagcctccaggtgattcttatgctcatggaagtttgagaaccgctgatcaatgcattcagtgactcagaaacagagtcccggactctacaggtttgttggttggttggttggttggttggttggttagtttgtttgtttttgtcacccatattcaaccagctggactccacagtatagcaagccactccgattattcttctgcatgttatatgtgataaaccatccacctagagtaggattgggggcagcatcttaacatctaactacttaggacacccaccctgtttacaggcagaaataaaggatttttaaaacaaagcaaatctgtgaaagaaccaactgaattaaatcgagaagtctaggcagagaggagagagagaaggggtccgtgtacctcatacgctgtgcaccagaatggaccctgcagaacctacctgctaccggggaaggtggttctgttggtaaccggctgggggtcacagaggttcctgggaaatcagaaaatgagataaatctgtgctctgtcgctgtgggtcctgaacaaataacgaaacatctccgtgactgagtttcctcaccggaaaaatgagcctaaagtagcttacatcactggactgttgtggatgttaataagcatttgagctgggtgcagtgcctcatgcctgtaatcccagcactttgggaggctgaggagggcagatcacttgaggtcaggagttcaagcccagcctggccagtatggtgaaaccccgtctccactaaaaatacaaaaattagccaggcgtggtggtgtgcacctgtaatcccagctgctcgggaggctgaggcaggagaatcacttgaacctaggaggcagaggttgcagtgatctgagatcgcaccactgcactccagcctgggtgacgcagtaagactccatctgaaaaaaaaaggcttagccaggcgtggtggctcacacctgtaatcccagcactttgagaggccgaggcaggcagatcacctgaggtcaagagttcaagaccagcctggccaacatggtgaaaccctgtctctacgaaaaatacaaaaattagctgggcatgatggcaggtgcctgtaatcccatctactcaggaggctgaggcaggagaatcgcttaaacccaggaggtggaggttgcagtgaactgagatcactccactgcactccagcctgggtgacaaagtgagactccccccaaaaaaaaaaaaaaaaaaaaaagcagcagcatttgtaaagcacacctggcacattctgggctattaacaaggaaatgcatgcagctcccgtccacctttttcaacctcagttctatttcttctggattcctgtgtcctacccctcactgtgaccctgggggcaaaacagatttttctaccaaaaactaaatgatgtattttgtttgatttaatatgacattgttaaatgtactgatcagtggcgttgggtatgttcacattgtggtacaatatgttgacctctagaacttatttttcttgcaaaactgaaattctgtgcccattaaacactaattccttctctctcctctttctggcccttaacaaccaccattgtactttgtgtttctacagtgttgacattagatacctcctttgactagaatcatacagtagttgtccttttgtgactgacttagcataatgtcctcaaggtatatccatgttgtagtatgtgtcagaatttccttcttttttaaggctgcataatattccattgcatgtatataaccacattatgaggtatg[220 bp omitted]gaggcagcagaatcgcttgaacccggaaggcggaggttgcagtgagctgagatcgcgccactgcactccagcctgggtgacagagtgagacttcgtcaaaaaaaaaaaaaagaaacctccattctcccagctgcctgtagcccagggcttcctgccctcccacttccttcccacctctggccccgcccctgcagcccagggcttcctgccctcccacttccttcccacctacggccccgcccctgcagcccagggcttcctgccctcccacttccttcccacctacggccccgcccctgcagcccagggcttcctgccctcccacttccttcccacctacggccccgcccctgcagcccagggcttcctgccctcccacttccttcccacctacggccccgcccctgcagcccagggcttcctgccctcccacttccttcccacctacggccccgcccctgcagcccagggcttcctgccctcccacttccttcccacctctggcgccgcccctgcagcccagggcttcctgccctcccacttctttcccacctatggccgcgcccctacagcccagggcttcctgccctcccacttccttcccacctacggccccgcccctgcagcccagggcttcctgccctcccacttccttcccacctacggccccgcccctgcagcccagggcttcctgccctcccacttccttcccacttatggcccctcccttggaatggccatcaggacctataaaggctgaggaagaaaggtttggtctgcactacccctacctgtgaccacaagctccagggggtcgctgggggctgaccacaggtatgggtccctgctggagaagctgtagcatcggtaggttccgctgtgggcggcggtcaccgtgatgatgggaaaactagccctgtaccatctctcgggattcttgtagggcgcagggtccccttccttgtacagagcaaattggtcaaagccataccgagtctgacactgtagggttacgtcccctcctgacgacaccgccgggccgggctgggctgagagcgagggtttggcaaaaactcctgggagaaaaagaaagtctgatgttgaaggcaggagccagcatctcagctgagactggggaggtccccacacctgcctaagagctggggagctttttggctgtatccctcccagagagcgcactcccccacccaagctcacagagaggtcgagtcacccagtggttgaggaaggaggctgtgctcacgtcctagtgcttgggtgcaaatcctagttctgccttcaggggcctggtggccctggagacaaatctccctctgtatctgagcctcactgccttgttctgttaaaatggggatgactgaatgagacagtacacagtaatttgcagagtgcctgttgcctagcaagcgctggagtaagtaaatagcttaagcttatactgtgctgtaagcttgtattgccacatacaattgttacgttgtaaatgtggctgacagtgctagcttccgggtgccttccaaacttatgatgtatatcagttcagtgaatcctcagagacctatggagtcctcactcttaatgtccctattttataaatgaaactaaggcacatggcattaaataatttgtccaactctaggtaacaatactgcagtgtacagctgaaatttgctaagagggtagattataagtattctcacacacaaaaaagttaactgtgtcaggtgatgtatgttaattagcttgctagtagtaactgtctcacagtggattcgtatatcaaaacatcaacttgtacaccttggatatattccatttttgtttttcaattatacctcaacaaagctggacatattttaatttaaaaataaataaaaaacttgtccaagatcataagtggcagagttgaaatctgcactcacagagtttgattccagggtctccgctcctaaacacgaacctacactactctgatgtgaggttgttgtcatagaccggtgtggtgatgcatgcctgcacacaggagtcagaaaaacaaaggttgaggctgggtgcggcggctcacaccggtcatcccagcactttgggaggccaaggtgggaggatcgcttgagcccaggaaggcgaggctgcagtgagctatgatcactgtacactagcctgggtgacagagtgagaccttgtctcaaaaaaagacagagagagaaagcaaaagaaaggaagtaaggaagataaaaatataagctgcctaataattatggcattcactcaacaagaagaaaaagaaagaaagaggaaggaagggagggagggaggaaggaaggaaggaaatatataagctgcctgataactgtaacattcactcagcaatattttctcttaattttcacttaagcaactattatgtgtctgtctgtattctttttttgttgtttcatttgttttgttttgttttgttttgttttgagacggagtctcgctctgtcacccaggctggagtgcaatggcatatatatatatatatatatatatatatatatatatatatatatatatatatatatatattttttttttttttttttttttttttttttttgggaaacagaatctcactctgttgcccaggctggagtgcagtggcatgatcccagctcactgcaacctccacctcctgggttcaagcgattctcctgcctcagcctcccgagtagctgggactacaggcatgcaccaccatgcccagttaattttgtatgtttagtagagacagggtttcaccatgttagccaggctgatctcgaactcctgacctcaggtgatccgtccacctcggcctcccaaagtgctggcattacaggcgtgagccaccgtgcccgaccaggaattaaaaatagacaaccaccaccaagataaaaaaaggtatacttcacataccagatagtgaggagggccactttgactagggtggtgggggatatacttagcgagaagagagtatttgagtctgaccctgaaagaagtaatgaggcagccaggctggtccattctagtagcagagaggaggccagtgatgctgtggaggggagtgaggcagggaagaggggagggaggcaggatttataacgcggaatagaccacagtgcagctggccaggaattagggtggcgtgagtgaggcactctcctgggatgtaaaatttaattattcccaaacaattaacatatttgaaaaaattattgaaaatttgaagagtaggtcgttaaaactcacattattctgtttgaatactttattcccctgaaagatttattagaattttacattctaggcttttgtggatgcaagcgcatcagtgctatttccaaaacctacttctagaaaataaccatttaaaagtgcactaactgggtgcacctatagtcccagctactagggaggaccacttgagcccagggatttgaggctaaagtgagctatgatcatgcctgtgaatacagcgagtgtactaaagcctgggcaacatagtaagacctcttctctttttttttttttcccaagacggagtcttgctctgtcgcccaggctggactgcagtggtgcaatctcggctcaccgcctcccaggtttaagcgattctcctgcctcagcctccggagtagctgggattacaggagtgcgccaccgcgcccagctaattattattattttttttagtagagacggggtttcaccatgttggccaggctggtctcaaactcctgaccttaagtgatccacccacctcagcctcccaaagtactgggattacaggcgtgagccgccgcgcccggcccaacctcttctcttaaaaaaaataaataaataagaaaagaaattagaatatttgcaccaatcaagagtctaaggagacataaatactaaatgcactgtggggccctggacggggtctgggaacagaaataggatattagtggaaagactggtgaaattcaaatagcctggagtttacttgatataatatagttgtgtctatggttagttttttgtttgttttttgatacagggtctcactctgtcacccaggctggagtgcagtggcgtgatcacagctccctgcagcctcggcctccctggctcaagcgatcctcctgcctcagcctcctgagtagctgggactataggtgtatgccaccatgccccactaatttttaattttgtttaaagatgaggtctcactatgttgcccaggctggtcttgaactcctgagctcaagcaatcctcccgcctcagcctcccaaagtgctgggattacaggtgtaaaccactgggaccagtgctacgtttattttttggttgtaacaaatgtaagatgttaacatgaggggatcctgggtgaaatatttccattaatattatctttggaacttttctgtcagtctaaaaattactccaaaacaaagttttaaaaagaatcccgagccaagcacggtggcccgtgaccgtagtccctgctactcatgaggctgaggcaggaggattgctcaaggcaaggagctccaggctgcagtgagctatgactgctcctatgaacagccactgcactccggcctgggcagtgtagcaagaccccatcgctaatttttttaagtgcattaaaacacagataaagggttgcctgtttttcgttttggcacagactctggtatgacttgacacaggcactggctgattctgcctttatttgaaattctggtttttttcattgtggatgtttttgcaatttattttgatttttttaaaaattgcatgaaaatgttattcacagccagatgcagtggctcacgcctgaaatcccaacactttgggaagccaaggtggaaggatagcttgagcccacaggagttcgagaccagcctgagcaacatagcgagaccctatctctctctcttttgtattttaatgccttttgtgaaaactgtcaagagaccccatctctataaaaacataaaaaatgagctgggcgtggtggtgcacacctgtaatcctagctacttggagggctgaggcgggagaatcgcttgagccctggaggtggaggctgcagtgagccaagatcgcgccactgctctccaccctgggtgacgcagcaagaccctgtgtccaaaaaacaaaatattattcacattgatccataaatgtcgtggcaccaccacccgctaggccagtgcctcgtttgcctcaccctaatccctgccctcaatgtcccccgtatttgtgtcctgaacggaggaccacgcagtcccaggctccgatcccccttcctttacccgtggcaacgagctccagctggtcgctgggcagggaccagaggcttccgttctggtaggagcagcggtagcgtccagccagacttctcttcatggccgggatgaagaggactgcctgatcctggtacctgctggaactcagcttctccaggcggtacaggtccacgcccggaggtccctggcaccggagggtcactggcttctccaggggcaccagggagctgggcagagcctggagggagggcttggggagcggtcctggaagaggagcagggctgggtcagcctccccgcagaccccgcctggaccccgctgctcccgcgctggcggatcccgcaggagggaaggggtctggggaaggactcaccactctgcgctggcacacgccccagacacagccctgaggaaagaagaaagggaccagatgccaggactcgcttttatggacattcctgcctgctgggcgcggtgataagacatttgcatgcatatgctttactctgtcctaataatttcttcaaaagacacacaggaatgtaatttaagtgagagaaaccggtcagaaaaagccacatagtttatgaggtcatttacatgaaatatccagaataggtaaatctataggagatggagaagaaagcagatccatggctgggggtggtgggagaggagggcaaggcatggtggcgtactgctctctgtggacttgttcgtgttagacacggtgggctcgttcgtgttagacacggtggactcgttcgtgttagacacggtgggctcgttcgtgttagacacggtgggctcgttcgtgttagacacggtggactcgttcgtgttgtgttagacacggtggactcgttcgtgttagacgcggtggactcgttcgtgttagacacggtggactcgttcgtgttgtgttagacacggtggactcgttcgtgttgtgttagacacggtggactcgttcgtgttagacacggtgggttcgttcgtgttagacacggtgggttcgttcgtgttagacgcggtgggttcgttcgtgttagacgcggtggactccttcgtgttgtgttagacacggtggactcgttcgtgttagacacggtggactcgttcgtgttagacacggtggactcgttcgtgttagacacggtggactcgttcgtgttgtgttagacacggtggactcgttcgtgttgtgttagacacggtgggctcgttcgtgttgtgttagacacggtggactcgttcgtgttgtgttagacacggtgggctcgttcgtgttagacgcggtgggctcgttcgtgttagacgcggtgggctcgttcgtgttgtgttagacacggtgggctcgttcgtgttgtgttagacacggtgggctcgtttgtgttgtgttagacacggtgggctcgttcgtgttagacattgcccattgacttcctcagtggatgtgaggaatgggacctgagacattgctgtcccttcgtttcctcccttcagtctcccaatattaaataatatccaagtacattacaatagtatgcaattgtatagacaagtattgtaaatactattgcatattgtatattattgtattttattgtctatgtaatatatgcgataaaaccccacactaatgggatgcattgggctccaaggatggagcaggatggagcctcagcgtgtaagtcaggacgtctcagcatgtgctggccatgggtttcccggtatttacaacatttgcttgaatcagtattccatgattacatgataggatataatatatataataatcgtttcaaatagcctgaaggaggatggggaaagttcccaacacagaaaggatgcatgtttgagaagatgggtgtgctacttaccctgatctgattactatatgtatatacacatatagtgcatatatgtaaacctacatctatacatacatgtgtatgtacatatacacgtgtgtacatacacacgtgtatatgtatgtatatgtatatatgtatgcatgtgtgtgtgtgtgtgtgtgtgtgtgtatacatatgtatacaaatacatgtacataagcgatcccctcctggaattgcttgagcccaggaggtcaagtctgctgtgaggtaagattgcaccactggccgggcacggtggctcatgcctataatcccagcactttgggaggccagggtgggcggatcacaaggtcaggagttcaagaccagcctggtcaacatggtgaaacaccatctctactaaaaataccagaaattagctgggcatggtggcacgtgcctgtaatcctagctactggggaggctgagtcaggagaatcacttgaacccgggaggcggaggttgcagtgagccaagatcacgccactacactccagcctgggcaacagagcaagactccatctcgaggaaaaaaaaaaatgatattgccccattgcactccagactgacaacagagcaagaccctgtctcagaaaacgaagaggaggaggaaaaaaaaagtactaattatctgaaattccaatttaaccaggcatccagtgttttatctggtaaccctcattcttacacacacacacacacacacacacacacaaaggcgggatagttgtcattcccactgtaaacataaggaaactgggcagaggccaagcaaccttgtgtagctcacatagcaagaagtgggtgaacccagctcatgtcttgactctgagctcagagagtgacaacttgtcaccagcgcccccatagccaccaccctttgtccaccccaggctccctctgcaccccaacgcaagctccggccgcttctctgtccccctcctcctgccgcatcacagcccacctcagcctctttgtaggtttccatgcgacgctgtaccatggctgggagtcttccaggcgccgtgctgagcgccttctgtgcatggactccaagtcgccataatcgtacgggttacccaccattatcagtcccctcttatacatcaggctagtgagacagtatcttatccacagtcctacagctggcaggagtagattcaaaccctagcagcaccaattagtggtaaagagtgtggacttgggaacttacaggagtagagagcacagtggtggttaccggggcggtggggtaaggtttggggagatgttggtcagaggaggacagtttcagttggacaagaggagtatgtcttggagatctactgcacatcatggtgactgtagttaataacaacatattgtacacttgcatatcaccgatagtagattttaaatgttctcaccggccgggcgcgctggctcacacctgtaatcccattttgggaggccaaggtgggcggatcacctgaagtcaggagttcgagagcagcctgaccaacatggtgaaaccctgtctctactaaaaatacaaaaattagcggggcgtagtggcaggagcctgtaatcccagctacttgggaggctgaggcaggagaatcgcttgaacctgggaggtggaggttgcagtgagccaacgtcatgccactgcgctccagtctgggcaacagagtgagactccatgtcaaaaaataaaaataaataaaaataaatgagcgtggaatactactcagccattaaaaggagtgaaataatgtcttttggccaggcacagtggctcacatctgtaatgccagcactctgggaggccgaggtgggtggatcacgaggtcaagagatcaagaccatcctgcccaacatggtgaaaccccatctctactaaaaatacaaaaattagccgggcatggtggcgggtgcctgtagtcccagctactcgggaggctgaggcaggagaatcacttaaacccgggaggtggagtttgcagtaagccgagatcacaccactgcactccagccttggtgagagagcgagattccgtctttaaaaaaaaaaaaaaaaagtcttttgcagcaacttggatggagctggaaggcattattctaagtaaagtaatacaggagtggaaaacaaaaatctgtatattctcacttataagtgagagctaagctgtgggtatgcaaaggcatgcagagtgatgtaatggacttcagagactcagaagggaagggcagaagtggggcagggatgaaaaactacacattaggtacaaggtacactagtcaggtgacaggtgcactaaaatctcagaattcaccagaatataattcatccatgtaaccaagaaccacttgtatcccaaaagctactgaagcaacaagccagatgcagtaacctgtacaggccacacctgtaaccccaacactttgggaggccgaggtgggtggatcgcttgagcccaggagttcaagaccagcctgggcaacatagcggacccccgtaactaaaaaaattacaaaaacaagccaggcatgatggtgtacaactgtagttccagatactcaggaggctgatggggaggcactggttgagcctgggaggttgaggctgcagtgagccatgatcatgccactgccctcctgcctgggtgacagaag[155 bp omitted]cccctactaaaaatacaataattagccagacctggtggcagatgcctgtaatcccaactattcgggaggctgaggcaggagaatcacttggacccgggaggcagagtttgcagtgagctgagatcatgccattgcattccagcctgagcgaccgactgagcgagactccatctcaaaaaacaaacaaaaagaaaaaaagaatacatccatggatggataatgaatgagaggttgtttatattcacagttaaccctctcatctccagtaatgcaaccatcttcttcctgcttagccttttggagatgctgtccctttagtggtcaaattctgaagaaatcaggaaataatgcattcgacatgcccagcacaagtgaagatcaggcagcagaaatgcattcgacctgccacccatccatcaggagactatttactccactactgtaggggatactgacaaattaaatccatacctagtccagatatcaattccacaatttttttttttttttttttgagacggagtttcgctcttgttgcccaggccagagtgcaatggtgtgatcttggctcaccgcaacctccacctcccaggttcaagcgattctcctgccttagcctccagagtagctgggattacaggcatgtgccaccacacccggctaattttgtatttttagtagagatggggtttctccatgttggtcaggctggtctcaaactcccgacctcagatggcccacccgcctcggcctcccaaagtgtgtaagccatggcactcagcctttttttttttttttttttttttttttgagatggaggctctctctgttgcccaggctggagtgcaatgcctgacctcagctcactgcaacttctgcctcccagtttcaagcaattctcccacctcagcctcccacgtagctgggattacaagcacccgccatcacgcccggctaatttttgtagagatggggtttcaccatgttgaccaggctggtcttgaactcctgacctcaggtgatccacccacctcggcctcccaaggttgagattacaggcgtgagccactgtgcctggcccacattttttaaaaaaggggcaactgcagtgtagtagaacaaagttgtgaccaatgctaggatactctgttcatttcctgacccagccatgaatacactggaataactcatgcaaaatgccagctcgctggccccccgtttccccacccaacaaatgaaggggctcttacaggttcctttttgtcctgaaattcatcaccaatgcaaatttcttaaaaatcctttgtctggcagtccatgcctgtccttcagcatttcccagatctgaccctcaggactcaccaagacagaagagggcggtcggggatggagacatggttcctcagccctgtcctgagctctgtggccagggagggaagtggtgggagcctggggcacaggctcaggatgtgatgaggatgaagaatgctctcctcccttcctccaccagccccggcctttcctaattgagactcatcgagccgtagccggctcctcagtacagtgacttgcacacaagctccaaggagccgcgcttatctcctctggccagcctggcgttgcaccgtttgtccgcctgctggggcctggtctgtgttcccgtgctcccataaactccctgatgtcactaggaaaatacgcatcaaaaccacagtgagatatgacttcacaccttctggaatggctgtattttttttttttcttttgagacaaagtctcgttctttttgcccaggttggagtgcagtggcgccatctcggcccactacaacctccacctcccaggttcaagcgattctcctgcctcagcctcccaagtggctgggattataggtatgtaccacaccaggctaatttttgtatttttagtagagatggggtttcactgtgttggccaggctggtcttgaactcctgacctcagttgatccacctgcctcggtctcccaaagtgctgggattacaggcatgagccactgcacccgaccggctataattttttttaatggaaaacagcagatattggtgagtatgcagagaaattgaactgcgcgtgcattgctggcagggacgtaacatggcgcccctgctgtggaaaacagttccagcagctcctccagaagttaaacgtgggattgccataaaatccagcaattccacttcggggtacacacctaaaagaactgaaaacagggtctctaacatatttgtacacagtgttcatagcagctttattcacaatagccaaaaggtgaaaccacccacatgtccatcaacaacaatggataaacaacatgtggtatatacacaca[145 bp omitted]accccatctctactaaaaatacaaaaattagctgggcgttaaattagccgggcatggtggcaggtgcctgtaatcccagctacttgggagacggaggcatgagaatcgcttgaacctgggaggcagagattgcggtaagccgagatcgcaccactgcactccagcctgggcggcagagtgagactgtctcaaaaataaaaataaggccgggcgtggtggcccatgcctgtaatcctagtactttaggaggctgaggcaggcagattgcctgagctcagcagttcaagaccagcctgggcaacacagtaaaacccccaaaaaatacaaaaaaaaaatagccgggcatggcggcaggcacctgtagtcccagctactccggaggctgagacaggagaatggcttgaacccgggacgcggaagttgcggtgagccgagatcgcgccattgcactccagcctgggtgacagagcgagattctgtctccaaaaaataaaaaatattataaaagaataaattcagatacatgctacaacgtgatggaccttgaagacattatgctaaaggaaatattccggacttgacagataaatactgcattgtgccgcttatctgaggtatcgagaggagtcaaattcatagagacagggattagaatggtggttgccaaggcctgggaaaagtggggagttactatttaatagggagcgcttaggttgaagatgatgacaaagtctgggggatccatagtggtgatggttacacaacactgtaaatgtatttatatttaatgccattgactgttttttgttttttggttttttgagacggagtctcactctgtcgccgaggctggagtgcagtggcgcgatcttggctcaccgcaacctccgcctcccaggttcaagcgattctcctgcctc[134 bp omitted]aagtgctgggaatacaggcatgagccaccgcgcccggccagtgccgttgacttgtatgtgcacttacaggtggttaaaatgagaactatcagggtgttgatatctaaaaacctccctgccatcatcttccctacatctctcattcagtgaccatggttgaatgcctgccacctttcaaatattatgtcaggcactcagtattggcagttttatccattataaatgctttaagctgcatagaattttaaacgtgttaataaaagtagttataaatctttaatacataagctggctttaaaattattggtaaaataagattagaaatgtcttaagaattgttggcgtttttgtttgcacttattgaacgagtggtttcatgcttatccctgcagaatactatgagatttgtcataagggttataaaactataaacccggctgggcgtggtggctcacgcctgtaatcccaacactctgggaggccgaggcaggcagatcacctgaggtcgggagtttgagaccagcctgaccaacatggagaaacgccatctctactaaaaatacaaaattagctgggtgtggtggcgcatgcctgtaatcccagatactcaggaggctgaggcaggagaatcgcttgaacccgggaggcagaagttgcagtgagccgagattgcgccactgcactccagcctgggcaacaagagtgaaactccatctaaaataaataaaaataaaacatttgttttttgtagagttggggtttcactatgttgcccaggctggtcttgaactcctcctgggctcaagcaatccaccgacctcagcctcccaaagtgctgggattacaagtgtgagccactgtgcctggccctattgggtccttttaaaagatacataaaaaatcaaatgcaacagtgaagtcaatcacccgatggcagaaattggggtgctcctggcatgtggtcggtcgaagccaaggacactgctcagcattctgcagtgcacaggacggccccgcccaggcggagaatgatccggtgacacatataggtgggaaggatgcacgaatgatggcgtttaggaagaatattatcacttctttcccgtaagagcaacttagagcaagaaaatggtattattcttagggccttctctcttatggaggctccaagccagggttgccatggcagaagatgctgggcttgctttttccttgagagaactgtactcaagatgatgtaactgtcaccccgggtgccacttgggtgctttggagaagcgctcagacgcgacacgccgtgacgactccgcggcaggcagccggacctgtcctctggcgtgcggttcacgggctgtgtttatccccctggttccttcacagccaccttgggaaatacgttgcctctgaatcacgccaggcaggctctcactgtgtgtgctgcggggctggaaatcagggtgacactccgctaccgaacagcctgactaggaagccagaaagacgctgccggctttagtttgtcctttgactttccttgatatgaatgaagatagagcacttccacactgcacaacaggaaaagcccagaacgcttcctggagatagcgagggggtgatgcagcggacagctatggctgatgaccccctcacctctgactccccctccctccctgctttctgaacgcacatccatcaccaaccataggttcctgtttggggtttgctggctggaaaaaaaaaaaaaaaaaaaaggaaagctggctttctagtaaaaaccacttcctttgctcatttatcaaactcaaacgctaggagggccacctaacatcctccgtcccacgcaatggggtgtttctggagcactccggtttatcagggaccctgtcagttgccatcgcacatgtatatggggccagcccctgtgccaccgaagaggggggatattgaaaacatgttacagccaggagcggtgcccccttggttcaagcagttcttctgcctcagcctccctaatagctgggattacaggcgtgcaccatcacgcctggccactgttatgtagtttttaccacaatttaaaaaaggaaagagtgcctgggtgagtcctacgcacctattcggagaaccaaaggctttgaggttatcctcggcccacccatctgatgggagtgtttctcaaacttgcttttccgtgatctcccagtaagaaatacctactacacacacacagtctccggtcggcatgcttagggtagtcttccaattccccctcctggtatttacaccctggagtggtccgctcctcttgggctgaacctgtaacttgctcccaagcaagagcacacagcaagctcacgcacgtggttgttggtgtgattctgtttctccagattgtctccattcctccctggcttctccacagggccgctcaccatggcagccggctccatcaccaccagccagcgagagggcaagacaagagggctgacgagggacgctaccatcacagaggtcagttttgtaacctaaccacaagactaacctactgtcacttctgccctatcctactgctagaagccagtcgctacatctcccccacactcaaagggaggtggtcgcaccgtggggtccactggaagttgcctaccagactcaggtcatcccaaacacaccctctagccatttggtgtggcatcggaaagaaaactaaggccaggtacggtggctcatgcctgtaatcccaacaatttgggaggccatggcggaagggtcacttgagcccaggagtttgagaccagcctgggcaacatagcaaatgttatgttgccacctctacaaataattagccaagtgtggtggcatgcacctgtagtcccagatactcaggaggctgaggcaggagaatcacaggtcgaggttgtagtgagctgtgacggcactgcactccagccttggcaacacagtaagacctcgtctctaaaaaagcaaaaagggctgggtgcactggctcacacctataatcccagcactttgggaggccaagacgggtggatcacctgaggtcaggagttcaagataagcctggccaacatggtgataccgtctttaattagccaggtgtggtggtgggcgcctgtaatcccagctactcgggaggctgaggcatgagaatcgcttgaacatgggagacacaggttgcagtgagctgagatcatgccattgcactccagcctgggcaacagagcgagactaggtggctgttctgtgtactgtgggatattgagtagcatccctggcctccccagtatctcaaatatgaaaacatgttttctatctcgattactgagcttttcggtgcctccttcggttctgcacctaagctaagagccccttcatctcaccctgatctctatccagtttctaacacagcagtcttgtaagatgcccggacttaaacggttatttcctgtgaaacaggtgaaaggggctttcatctctaaaaagtcggaacttttttttttttttgagacggaatcttgctctgtcacccaggctggagggcagtggcatgatctcggctcactgcaatctccgcctcccagcttcacaccattctcctgcctcagcctcccgagtagctgggactacaggcgcccaccacca[141 bp omitted]ctgatgccttgtttcctaaaaggaataaagccatgagttgcctttgttcagctcatgggcattcacccatgcacagaggaaaaataaaatctacgactcgggtacattttcttcttttttttttcttttaaatgagcaagtttgagagtctgcagtttggactaccatgagaattgataggaaggtgggagtcccaggcaatcccaggtcctgtagcagcagctggtggggttcccactccatgccgtgcagagcctgaactcaggatgacacctgcacctgctctctggctgggctctggcacaggaagccctcagcaaacacccccggcacagccatgccatagccagacaacagctcgctgtaccacaccatcatgggagacagcagttattctgagcatctcactgctgaagaaaccaaggctcagagaggaccatgcatgcacaaggtcccacagggacccaagaatccaccaagtgtcagacaacttgcccatgctcttcacggagcaccttggaaccctccccgacaggcaccgctggctctcctgacgtggcctgcaagtgcacggagccccttcctcctcggccattcccagtttagattcccaggggaagcatcagatggcccctctcccctgctggcagcagagcagacggaaccagccagagcccagggcagtgctcacctgcaggccagtccactgcggccagcaccgccccctagaacctactgcgggcatggcggccgccagtcctgggtctcccggctcaggtagtgccaggaagctgcgggcatggcggacagctgtcctcggtctggaggcgccatcctggctttcaaatctgctccagaggttatctggggaggggctgctccctcacagagggagcctctaagcccaccaggcgggcactttcagcccaaagcctccgggccacctcctcatcctcagcctcgggggccggggccttctgtttgagtccatcgaagtactttccggaaacatccgccagttcctccgccacggccaggtatgtgctgggctgggcggccagctcggggctcttgaccagcagccagaagatgggccctgcaatcagcccacagggcatttagtccacactcgctcagagagaaggaaggaagccccgctccccggtcagggagctccgggtccctggagtcccacagagccctcctctagccctttccccttggctgcctccatctgcagttcccttccctggcactgcccaggcaaatcccaccagaccagggatcagaccaaaagctgcctcccccaaggagccttcctggctttgtccaggaaaatggaagctctcttcctcttggtcagccccagtcctcaccctaccccatttctcctttaataacatcttattaaatgcacctg[136 bp omitted]accccatttctactaaaaatacaaaaattaactgggtgtggtggcgggtgcctgtaatcccagctgctcgggaggctggggcaggagaatcccttgaacctgggaggcggaggttgcagtgagctaagatcacaccattgcactccagcctgggtgacaat[132 bp omitted]cgtgtgaaaccctgtctcaactaaaaataaaaacttagctgggtgtggtggtgggcgcctgcaatctcagctactttgggaggctgagacaggagaatcacttgaaccgaggaggcagaggttggagtgagccaagattgtgccactgcactccagcctgggtgacgagcaaaactccgtctcaaaaaaaaaaagacatttatttatttatttattgagacctggtgtcttgctctgtcacccaggctggagtgcagtggtgtgatctcagctcactgcaacctctgcctcccgggttcaagcgattctcctgcctc[134 bp omitted]cagcctcccaaagtgctgggattacaggcgtggctattagcctcgccaagttaagattcttgatgccaaccaatcacccactccatgtttttcaggattataaacactagtcataaagcatgaactgcctgggggtggtggctcacacctgtaatcccagcactttgggaggcagttggatcacctgaggtcaggagtttgagactagcctgaccaatatggtgaaaccccacctctagctgggtgtggtggtgtgcacctgtaatcccagctacttggagacaggagaatcgcttgaacctgggaggtggaagttgcagtgagtggagatcatgccattgtactccagcctgggcgacagagcaagacttcatctcaaaaataagtaagtaaagctccaactgtttgttccacctattctctgggcggggtcctgtgctggccctttcaaggaaggtctcgtataacccccccagtgactgtgaggtgagtcctattaaggcctgcactctgcagatgaagaaacaggctcagaggggtaacagctcttccccaggaggtgcagctggtttggggtgaagctggagttaccctgagtacagcctgactccaggcgtcagctccacggcctcttcctctgagacacggttttctcatccgccagcagggctctgcctgcttcccggggctgttagaggctggcaggccaggtcaacggaggaaagggacctgtgctctgtgcctcagaagacgtaggcgaggagcaggcatgaggcctcagggacggtctctgagggagggtcctgggccctgggctgagaaagcaggggtggagggctccacgtggagaccccaggctgggaggggactcaccgagtgtggtgctggagaaggtggagccatggatgcccgtgtgtctgcccagctctgtcctggccacgccggggtgcagggcgttgacagtcacaccagagcctggggaagaaagaaagagaagactgagggaggggtccagcctcacctgggaggctgtggcagcccacacccagctgtggggcttccgggcaccaggctgcttcctgcactcaaaccccatcgtccctcttgctctggaatcttagtgaagtggtcttatcttgcggagcggctctgccacatggctgctgggagccgagctttcctggagggcttcataaacccagaacgctgagcttaccccgggagcctgcatcggtgcgtggcggtgggacctaagatactgtaactctgaccagctcccagtggggctggcaccgctggtccacagaccgtctttcagaagcaaaggcctagcacagatttctcaatctcagcactgtggatgctgtgggttgggaggagtgaggggccatcccgtgcgctgtaggacattgagagcatctgggcctttaccctccagatgcccagagcaatctctccccaagccagctgtgatcactgtgtttccaggcattgacaactgcgggtcaaaactgcccctggttgagactcactggctggagccaaaaggctgagctgcctgcccaacagcagcagggaaggacatctgatccaggcagactagaccacctgggatgaacagacaatcctcagaagaacgatcgattagtgatgtctgcttcaggcaccagaagcgggcagcgtggtccacatgctctacttttgctgactctgttctggatccaccgtttggcctcccatcagcctaggatcatggaaaggccgctctaggctcagagtaaagcaagagggaggccgagcctagcgcccccgtaccttgcagccgccggctcagctccttggtgaagaggacgatggcgagcttgctctggcagtaggcggctttggtgttatacttcctcgtctgccagttcaagtcgtcaaagtctatgtgcccagcaacatgggccagggacgagaggttgatgatccgcgaaggggctgaggctttcagcttgtccagcagcaagtttgtcaagagaaagtgacctggattaaggatgatgaaaaggtcacttttgactcacacctaaaatcccagcactttgggaggacgacgggggaggatcgcttgaacccatggtgcagcccctgcccaggcctcacccaggtggttaacgccaaactgcatctcgaagccgtcctcggtggtccagtgggggcaccgcatcacacccgcgttgttgattagaatgtccactcgctcctcctctggaagagaggggtggaggaggagacatcccggtgaggacagaccccagcctgatgcaccagcagaaacactcctgtgctcccacaacctgtgaatgtggcctgtgccggaaacagggtctgtgccgaagtggccatgtcaggatgcggtcattagggtgagccctaatccaatgactggtgtccttataggaagggaaaacagagacagagacacatggggagaaggccatgtgtggacagaggcaaagaccggagaggcacagctccaaggtgagggtgggccgcccccgctggaagtggaagaggctgggaggattatggcccgtctcacaggtcacagccacagggacaccgcgattcagactgccggcttccggaaccgtgagggaatgcacgtctgagggtgtaagccactgggtttgcagtacattgttacagcagctccaggacactcacacgccctccgcacctccatctaagccttgggactccttcctgccggagccccgaggccaaaaacgggaggttaccggtgggagccccggcaccgcaggcgtggtttcattcccaaacctgccacctcactcatacaagcaaccaaaggacacacagatggagactgcagcctcagtttcctcagctgtaaaatgcgctgaaccacagggccttcctccctgtaccactcagctcgggttccgtaac[141 bp omitted]agaaaccgcgtctttactaaaaatacaaaattagccaggcgtggtggcatgcacctgtaatcccagctactcaggaggctgaggcgggaaaatcgcttgaaaccaggaggcagagggtgcagtgagccgagatcgcatcattacactccatcctgggcaataaaagcaaaactccatctcaaaaaaaaaaaaaaaaatcacagtcccagaggctggaagtcccagatcaaggtgtgggcagggctggttccctctcagggccctcagggaggatccgctctggtctctctccttggctcacaggtgaccatctcctctctccctcttcccttcctcttccctttggagctgtctcttttttttttttcatttttccttttttaattttagatttttcagacatggtctcactatgttgcccaggctggtctcaaactcttgaactcaagcaatcctcctgctttggcctcccagagtgctgcaatttcactgcccccagcctatttttttttttttgggggggggagatggagtttcactcttgtcacccaggctggagtgcaatggtgcgatcttggctcactgcaacctctgcctcccaggttcaaacaattctcctgcctcagcctcccaagtagctggactacaggcatccaccaccacaccgggttaattttttgtatctttagtagagacggggcttcaccatgttggccaggctagtctcacactcctgacctcgtgatccacctacctcagcctcccaaagtgctgggactgcaggcgtgagccaccacactcagtctacttggcctattttttatatttctttgagacagggtctccctctgacacctgggctggagtacagtggcgcaatcactgctcactgcagcctcaacctcccaggctcaagcagtcttcttgctcagcctcccaagtagctggggccacaggcatgcgccaccatgcccagctagcacgtctgtttctgtgcgcaaatctccccttttcataaggacaccagtcactggattagggcccaccctaatgacctcattttcacttcaggacctctgtaaacacccacctctaaatgaagtcacatgctgagggatgggggttcaggatcccaacctatccttgggggtggaggacacaatggaattcataatgctcccgaagtggttttcggcggggatcgtgaattaggtgtccagcgcgtaacacacagacaccatctggttctctgtgtgagaaggagggggttgcagcacacccgtcatgaataccagctctggagcaggacagacaggttcaaagcctggctccaccccgaccagctgcatgatcctggccaagtcacatcacttctctgtgactcagtttactccttgtaaaaaaaaaaaaaaaaaaaggataataacatcacctgcctggtacaactgtatacttactcattcagtaagtattttctaagcacctattactgggcactggaaatacagggtggacagcacagccgaggccccgtccgtgtggaccggacattccagtgcagctgagagccacttccactcgtgagagaatctacccgtgacagagctgcgtggaagctgacaggaggcccctctcaggaggtgacgcagaaactgggaccgggaaaatgaggcagggcccacgtgcggagacccagggaagggggatgcaggcagcaggcgcagcacgggtaaggcccaaaggcgggacagggagactccactcacagctgggcgcccaggagtgccgccagcttctggtgttttgttttggttttttttctttttttttttgagatgaagtctcactctgccacccaggctggagtgcagtggtgtgatcttggcccatggcccactgcaacctctaccgcctgggttcaggcgattctgctgcctcagcctcccgagtactgggattacaggtgcccgccaccgcaccctgctaatttttgcatttttagtagagacggggtttcaccatcttggtcaggctggtcttgaattcttcacctcgtgatccacccgcctctgcctcccaaagtgcagggattacaggtgtgagccaccgcgcccagcctgtttttttttttttctttttatgagagggaagctcactcagtggcccaggctggagtgcagtggcgcgatctcagctcacagcaacctccgccgccagggctcaaacgatcctcccacctcagccttccacatagctgaaccacaggcgcccgacaccacaagcagctacttttaaaattttttgtagaaatggggtttggctatgttgcttaggctggtctcgaatttctgagcttaggcaattcgcccacctcggcctcccaaagtgctgggattgcaggcgtgggccacagtgcctggcctgttgttttgtttatctgggaactgcctcaactttttttttttttttttttttttggacacagggtctcaccccgag[134 bp omitted]tacctaaaacaaaaaagtagccgggcatggtggcaggtgcctgtaatcccagctactcaggaggctgaggcaggagaattatttgaaaccaggagatggaggttgcagcctgaccaacaggaagaaaccccgtctctactaaaaatacaaaattagccgggcgtggtggcgcatgcctgtaatcccagctactcgggaggctgaggcaggagaatcacttgaacccaggaggtggaggatgccgtgagccaagatcccgtcattgcaccagcctgggcaacaagagcaaaactccgtcttaaaaaaaaaaaaaaaaaatccctcactgcagcctcaacctcccaggctcaagcaatcctcccacctccacctcccaagtagttgggactacaagtgcacaccatcacgcctgcctcattgttttttattttttttttgagatggagtctcactctgtcacccaggctggagtgcagtggcgccatctcggctcactgcaagctccacctcccgggttcacgccattctcctgcctcagcctcccaagtagctgggttacaggtgcccgccaccacgcccggctaatttttttgtgtttcttagtagacacggggtttcaccg[134 bp omitted]atgttgcccaggctgatctcaaactccctgataaacaaggctgtgggtacctgcttcctggggctctttgctttgtgttctttctagtcgggagctgggaagagccacagcttccagctttgtcagagtgtcatctcacaaactgatcttcccaaaacttctgtctcccaaagtgccgggatgacaggcgtgaaccgctgcacctggcctgccccagtgtggtagaatacacaccacataaaatggacgatcttcactatttttaaatccactgctgtctttattcctggctgttgatcttaggaaaacaccaagaagctggtacttgatttgctaaaaaagtca[175 bp omitted]ggtggcaggcgcctgtagtcccccgccactcgggaggctgaggcaggagaatggcatgaacccgggaggcggagcttggagtgagccgagatgtgccactgtcctccagcctgggcgacaaagcaagataccgtctcagaaaaaaaaaaaaacccctctagagaatcccagaaaatagaaggaattattccatttcccggaagaggaacgtgtggctaagagaggaggcatcacctgcccaggtgtgtccagccggggtcctcactgtctcagggacctcagtgctccggacacctgtgtccacaagccagagacaggatcagaggcgccctgggtgggattgcctgggacagtgtgcatgaaggtgacagtgctgtacctggtacacagcaggtgcttaataaatgttcatccacctctgagactctgaggcattgccctctcactgttctttgtgatctcaccgtagtgcctctcacctacccgacaacagtgccggctctttcttgatccccaagggcacagcaggggctcagtatgaatgaatgaatgaaccaacgaatgtgcacctgcacctgcctccctagggctgtgagtggcacaaggacagctctggttcatctcacacctccagcacctggtcaggtctgagatcacgtctgctaaataaatgaggtcccacaactcccccattccttgttcatttcctgagtacccgtttactgagcggggcacattgactctgaagaagaaagctttggccctttcagtgccagactagaaaagaaacaaagcagctgggcatggtggctcatgcctgtaatcccagcactttgggaggctg[132 bp omitted]agaatcgcttgaacccaggaggcggaggctgcagtgagccaagatcgcatcattgcactccagcctgggtgacagagcaagactccatctcaaaaaaaaggtcttgctctgtcatccaggttagagtgcagtggcacaaatacggctcactgcagccttgaactctcgggctcaagtgatcctcttgcctcagcctcctgagtagctgggactgtaggcacatgccaggatgcccggctaatttttttttttttttaatctttggtacacacaaggtctcactatgcttcctaggctggtctctaactcctgagctcaagcaatcctaagagaagagattttaaatgtggtcaccacaaaaacaggtaagtatttgaggtaatgcatatgttaattagcttgatttagccattctacaatgtatacaatgtacatcatgctgtacataatatatacaagtatacatgtcaactaaacaataaataattttagtgtattcttgagtctatttaaagatgaacaagaatagaaaagctagaggatggtcccagttttacataaaaatatataaatacacacacaaacctattataaacaagactagaaagatccataaaagtgattctcctggggctggtgcagatcaaagttgtttagttctgtcttcttttttattgagacagagtctcactctgtcacccaggctggagtgcactggcacaatctcagctcactgcaacctccgcctcctgggttcaagcaattctcctgcctcagcaccctgagtagctgagattacaggtgtgcaccaccacgcctggctaatttttgtatttttagtagagacagggtttcaccatgttggccaggctggtctcgaactcctgacctcaagggatccacctgcctcagcctcccaaagtgctgggattaacaggcgtgagccactgtgcccagccagttctgtcttctttacattgcagtattttataaatgtcccataacaaacacatatt[135 bp omitted]cctgagcaacatggtgaaaccccagctctaaaaacaaaacaaaacaataaaacaataattagctgtgtgtggtggcgtatgcctgtactcccagctacttgggaggctgaagtgggaggatcccttgagcccagcaggttgagactgcagtgagccatgactgcaccactgcactctagcctgggtgacagagatggatcctgtctcaaacaaactaattattcaggtagggcacggtggctcacacctgtaatcccagcactttgggaggccaagggaagcagatcacctgaggtcaggagttcgagaccagcctgaccaacatggtgaaaccctgtctctacctaaaacacaaaaaattagccaggcacggtggcgggtgcctgtaatcccagctactcaggaggctgaagcaggagaatcatttgaaatcgggagacggaggttgcagtgaggcaagatcacaccactgcactccagcctgggcaacagagcgagaccccatctgtctcaaaacaaacaaacaaaacaaagtcagccgggcgcagtggcccacgcctgtaatcccagcactctgggaggct[135 bp omitted]aggtccgcgcttgaacccaggaggcagaggttacagtgagccgagatcgcgccattgcactcagcctggccgacagagtgagactccctctcaaaataacagtagtaataaataaataaagtcgttgcttgcaggctgtacaaaaaaaggcagcaactggacttggcccctaactcatagtttgccaaaactctgctctaaagtttgcttgcttcattcacttctcagagcctggccctgggagccgcctatcccagtcctcatcccacatggccagcgttctcctaccttcaatgatctttgctgcaaactctcggatagacttgagggaagccaagtccaggtgccgggcgttgacatggtgattgagggtctccccgcggatgtcctttgctgccgcctcacacttctccatgtctcggcaggccaggatgatgttgcctcctgaaaacccaggatggaaaaagatttaaattaataatccactcctgggtactgaccccagagacatgaaaacatacgtctacacaaaaacacatccaccaatgttcactgcggcattcttcacaaaagccaaaaggtagaaacaaccaaatgcccatctgtggatgaagggacaacaaaatgtggtccatccatagagatggaatattagacggccgtgaaaaggagtgaagcactggctcatgctacagcaaggatgaccgtcagaaacactgtgctcggggaaagaaaccagacacgaaagaccacacagcgtacaatcccatttacatgaattctatgtatatgatttcacacctatgaaacgcccagaataggcaaatccatagagaaagaaaatagattcttggttttctagggcagggggtggggagagggaattacagcttgatagttacagtgagcaggtttctttctagggtaacagatgttctaagattgattttaaagatggttgcatcattctgtgactatactaaacatcactgaattggtcgggcacggtggctcacacctgtaattccagcactttgggaggccaaggcaagaggattccccatcctctccttttttttttttttttagatggagtctcactctgtcacccaggctggagtgcggtggcgcaatctcggctcactgcaacctccacctcctgggttcaagcaattctcctgcctcagcctcccgagtagctgggattacaggcacctaccacaactagctaattttttatttttttatttttagtagagacagcggtttcaccatgttagccaagctagtcttgaacttctgacctcaggtgatccaccccgcggcctcccaaagtactgggattacaaataagccacaatgcccagcctccaattttttttgttgtggtaaaatacaaatcacttaaaatttatcatcttaacccccttttctttttgtttattattatttttttttttttgagtcagtctcactctgctgccgcggctggagtgctggcgccatcacagctcattcagccttgaactcctaggctcaagtgacctgggactataggtaccacctgtgccagcatgcctggctaactctggtagagatgggggtgttgctatggtgtccaggctggtctggaacccctggcctcaagtgatcctcctgcctcagcctccaaaagtgctggaattatagatgtgagccaccgagacccgccctcttagccatttttaagtgtccagttcattggtattaaaaacatttatggctgggccgggcatggtggctcacacctgtaatcccagcactttgggagaccaaggcaggtggatcacctgaggtcaggagttcaagaccagcctggccaacacattacaaacttagctgggtgtggtgttgcatgcctgtaatcccagctactcgggtggctgaggcaggagaattgcttgaacccgggaggcgaaggttgcagtgagccaagatcatgccactgcactccagcctgggcgacaagagcaaaactccatctcaaaaaaaaaaaaacaataataataattcctaatgttgtgcaaccattacaaccatccatctctcaaattgtttcatcttgccaaactaaacttccgtttccattaaacagtaactccccattctcccctcccctcctgacccctggcaagcaccattccaacttctctatgaatttaactgtaggtagctcctgtaagtggaatcataccgtatttgctcttctgtcgactggcttatttcacttcatggaatgtcctcaaggttcatctgtttcaatgcccttttttttgttttgctttgttttgttttgtttttgagtctcactctgtcacccaggctggagtgccgtggcgccatctctgctcactgcaacccctgcctctcaggttcaagcgattctcctgcttcagcctcccaagcagctgggactacaggtgcccaccacaactcctggctaatttttgtatttttagtagagagggggtttcaccatgttggttaggctggtctcgaactcctgacctcgtgatccgccagctttggcctcccaaagtactgattacaggcgtgcaccaccgcgcccggccagaatgcccttcctttttaaggctgaatcatatgcccctgtctatagaagccacattctgtttccctgttcatctgtggatgggtgcctgggttccttccacctccggactgtgaataatgctgcagtgagcatggatgtacagatatctctctgagagccaaagcaggggagattttacctctcctggccagttccaaggcggtctgcttcccgatgcctgtgttggcacccgtcacgatgaccgtcttcccagggatggtggccttgctggggcaagccccaccggtgacatagtccctgagggtgagaagcggcacggtcagtcctgtgggcccactctcaccccacgtgcccctgactgaatgatctcaggcaaccttgtctgagctcactcacataccccaactgaaacacagacatcatcacatcacaccaagggacctctgtcatgttctccataagtggctccacccagtgtctggcgtgtggaacgccttcagcaagtgacagtcattattttataaatgctcactgcatgagattcccggccaggtgagggggcttgcacctgtaatcccagcactttgggaggccaaagttttgggggtgggggggggcgggggcggatcacttgaggtcaggagttcgagtccagcctggcaaacatggcgagaccccgtctctacttaaaatacaaaaattagccagatgtgtagggaaaagagagattagactgttactgtgtctatatagaaaggaaagacataagagactccattttgaaaaagacctgtactttgaacaattgctttgctgagatgttgttaatttgtagctttgacccagccactttgacccaatctggagctcacaaaaacctgtgttgtatgaaatcaaggtttaagggatctagggctgtgcaggaagtgccttgttaacacaatgtttccaagcagtatacttggtaaaagtcatcgccagtctctagtctcaataaaccaggggcacgatgcactgcagaaagctgcagggacctctgcccttgaacacagagtattgtccaaggtttctccccgtgggatagtctgaaatatggcctcgtgggatgagaaagacctgaccgtcccccagcccaacacccgtaaagggtctgtgctgaggtggattggtaaaagaggaaagcctcttgcagttgagagagaggaaggccactgtctcctgcctgaccctgggaactgaatgtctcggtataaaacctgattgtacatttgttcaattctgagacaggagaaaagccgccctatggcgggaggcgagacatgtttacagcaatgctgccttgttattctttactccgctgagatgtttgggtggagagaaacatcaatctggcctacgtgcacgtccaggcatagtaccttcccttgaacttaattatgtcatagattcttttgctcacatggtttttgctgacctcattatcaccctgctctcctactacattcctttttgctgaaataatgaagataataatcagtaaaaactgagggaactcagaggccggtgccggtgcaggtccttggtatgctgagcgccggtcccctgggcccactgttgtttctctatactttgtgtcttatttcttttctcagtctctcgtcccacccaactagaaatacccacaggtgtggaggggcaggccaccccttcacaggcgtggtggtgcacacctgtaatctcagctactcagggggctgaggcacgagaattgcttgaacctggaaggcggaggttgcagtgagtcgaaatggtgccagcctgggcaacagagcgagactctgtctcaaaaaaatttaaatttaaatttaaaatgcccgctgcacgagattcccaaggctgctgtacgcattaccacagacttagtggcttaaaaccacataagtgcatcctcctccagttcggcaggtcaagagtccaaaacatgtctcactggaataaatcaaggtattggtagagtcaggttccttctggaggctctagggaagaatccacttccagctcctacagaccgccacattcctccactcttggccccgcctccatcttcaacct[148 bp omitted]tgccttagcctcctgagtggctgggattacaggcacatgccaccacacctggctaatttcttttgtatttttagtagagacagagttttaccacgttggtcaggctggtctcgaactcctgaccttgtgatccgcctgccttggcctcccaaagtgctgcgattacaggcgtgagccaccacacccaacaacctctccttctatcttccatctcccctctgactgagcctcctgctccctcttataaggaccctataagactacaaggcaggaccggcacagtgcctcacacctgtaatcccagcactttgggaggccaagacaggaggatcacttgaggtcaggagttcgagaccagccatggccaacatgctgacaccccatctctactaaaaatacaaaaattagcagggcttggtggtgcacgcctgtagagtcagctactcgggaggctgaagtgggaggaccacctgagcccagggagggtgaggctgcagtgagctgtgacagcatgactgcactccagcctgggtgacagagagaccctgtctccaaaaaaaaaaaaagactacatgataatcataagatccttcacttggccgggcacggtggctcacgcctgtaaccccagcactttgggaggccaaggtggccagatcccctttggtcgggagctcaagaccagcctgaccaacatggagaaacctcgtctctactaaaaatacaaaattagacaggcgtggtggcacatgcctgtaatcccagctactcaggaggctgaggccggacaatcgcttgaacccgggaggtggaggttgtggtgagccgaggtcgtgccattgcactccagcctgggcaacaacagcgaaactctgtctcaaaaaaaaaaaagatgcttcacttaacacatcagcgagaacctctgacacgtgaggtaatgtcgtcacaccttccgaggattaggacgtggacccctctacggagtcacgactctgcccaccacacccatgtcccacagaggctaacgctggcaacaagatagtgtccagcaacaggaggctgagcaggtaaacagcactgcacccacaggagagaagggcaccatgcaatacagtggccaccagccacagaggctaatttttaagaaagtttaaattaagtaggctgggcgaggtggctcacgtctgtaatcccagcactttggaggccgaggcaggcggatcacctgagggcaggtgtttgagaccagcctggccaacatggcaaaaccccgtctctgcgaaaaatacaaaaattagccgggcgtggtggcgcacgtgtgatctcagctcctggggacgc[137 bp omitted]aaataaagagtttaaaagtctggaaggaaagcaacatttacaagggcccaggctcgcccttccctccgagtgaccttgggccggtgacctggccggccagagcgcaggtttgccccactccgggcgggcactgcgggtcgggagctacggggcctggacccgggtgcgaggggcgggggtctccgccgccttcccggcccctgcgctgggggcccgccttgaccgcgcacgcggggctagaatgtactcacttgagcagcacggcggcgcctgctaccgtgcccagcgccgacagcggcagcaggtagcggctcatgccgggccggggacaggcgtcaggcgtcaggggtcggcgcggagcttgctgcacaccagccgcctgggtagctccgaggaagagcgcgcgacgcagccacaggcgagcggaggcgcaggcgcggctgggcccgcgtccggaactgggctgcgaggggcggggcgcgggcggagggggcggggatcctagggacgggacctatgagcatcggtcctgagcgctgtcacagctgggattggtggtttcaggagcctgtgggcgtggctagtccgggggcggggcctatggtttgttcgaatgacgtcacacttgccgcagcgtataaggcgctacgcagttctggagtgaaataggttcgaatcccaccactgtcaattccagactgtgaccctctgtgtgtctttcaactatatcagcctattccctcatctggaaatgtgtgtttaccttcttcatagacttttggagataatttgagaatttccatgcacagaaacaaggatctagtagcctgtgggtacccaagctcctggggtcctgcaggagaaggcggctgggggcctggactcctgggtctgagggaggaggggctgggggcctggactcctgggtccaagggaggaggggctgggagcatggacttctgggtccgagggaggagggccgggtgcctggactgctgagtctgagggaggaggggctgggggcctgattcattcccaaattatcagaatctcatccccatgtctggccctgcacagagatatcttccctgaactctgcctgaactacctttcttagattgagtattgcacacactcctgcacttacctgtccatgtttgtcacccccaccaaaccgggatgcacctctgggcacctgcttccccttgcactgctcacagcgagtgtatctgatcaccacctcctacccctgactgtgcctgaggtgccaggagcagacaccgctggaaacagggaagaattcaacccaatctaactaggagtaagttttcttcctcatcagatgaactgtcatcttcttatatgagccctgccataatggag[142 bp omitted]gaaaccctgtctctactaaaaatacaaaaattagctggatgtggtggcactcacctgtagtcccagctactcaggaggccgaagcaggagcatcacttgaactcgggaggtggaggttgcagtgagccgagattgccctactgcattccagcctggcgacagagtgaaattctgtcaaaaaaaaaaaaaccttaggcctgtagaccttaagctctcaccatctcaaacgtattaaaccagttacacaatgccaaatgctgtataagaggcacttggaggagtcaaattcatagagacagaaaacagagtggtggctgcagggggctggagatgagattgggaagtcacaggatttgtttttgtttgtttgtttgttttgttttgttttttgagagacagtctcactgtgtcacccaggctggagagcagtgggcgatctcagctcactgcaacctctgcctcctaggttcaagcgattctcctgcctc[134 bp omitted]cggccacccaaagtgctgggattacaggcatgagccaccgcacccggccgggaagctgttttttaatagatacagagtttgttttgcaaaataaaaaaaagacctgaaggtggacggtggtgatggttgcacaacaatgtgaatatacttaacatcactgaattgtacacttaaaatggttaagatggtacattttactttatgcatagtttaccaaactaaaaataaagaaaaattttagactgggcatggtggctcatgcctgtaatcccagcactttgggaggccaaagtggagaatagtatgagcccaggagtttgagagcggcctggacaacacggcaaaaccttatctctacaaaaaatacaaaaattagcaggtttggtggcacgcatctgcaccctcagctacttgggaggctgaggtgggaggtctgcttgagcccaggaggtcaaggctatgatgagctgtgattgtgccactgcaccccaggctgggtgacagagcaagaccccatctcaaaaataataataataaatgtttacatttaataacatgggcaattggttcagatgttcattttctcaaccttgaaaaaaaaacaacactgtttttccctgtctttttctccttttctgtaaactgaaatcctaatatcattgacttccaggacagagatcagcaaactttttctacaaacagccagatagtaaataatttcagctttgtgatccacacagtggctgttgcacctcctctgccagaggagctgggaagcagccacagatgatgtgaaaacaagtgagcacagctgtgttcccataaaactttatttataaaaataagcagtgcgccacagttcgccagctcctgtttgagagtctctctccgatgcccaggctggagcgcagtgatgcaatctcagctcactgcaacctctgcctcctgggttcaagcgattctcctgcctc[134 bp omitted]cagcctcccaaagtgctgggattacaaagcgtgagccactgcgcccagctacctgtcattgaatttggaaggatggcatgaagtcattcataacaaggacttaatccatagtaagtgccagaacattgctggctgttaatatggttattataaagagaacaatgcatgcatattcctcctctgaggatctcctacctgattcccagacacacccaagggagttagaacatctgtttggactccaggtgggctgtccacgcctttaccattttcctggttgttaacatgttcctgatcagcactgggtgctgtcccaggtgctgagaggattctcccacaatgccctttgctttccccatcagagggtttatggcacccaattctcattcacattctgtctctcctttctcgttcttctctatctctcctctctctgtctccttttctcttcctctctccctctctgtcttctctccctctctctccctctctcttcctctctctcttcctctgtcctcttttctctctctctctccctctctctcacatctctctttcccttcctttctctttcctctctcttcctctctccctctccctccttctgtcttcctctatccctctcttcctcttttttcttcctctcttcttgtctctttctctcctctctctctccctctttctctttctctctctcttcctctcccttcctcttcctctctctccttctttcttcctctctctcttcttgtgtgtgtctctctctctctgttctctctctccctctccccccaactctctttccctacacacatcttaagaggcctcagcagtgtaaggtaagtttagcgaccctgtggctgtgtagagataagcaaaggggggcaaggagctccagtggtcccagactccagccatttgagtctttgcagcccaagcactgccccagcttcttgacagccccagccatcaccaaagggcacacagataagctgcctccaccaaggcctgtgcagatggtaggtttttgagtaaaatagatatgatccttgtctgaagccactgagttttagaataatttgttatatggccatagtaactggaatgattgctgtaggtttattttattttattcatccttgctgcatgcaacacatgcatggctcagtaactagaaggaaagaagagaagaagggagggagaggcagagggtggacaggagaggatggtaggaaggaaagacaggaaaggagggtgttggtggccttgcctgcaagctgagcagacaccacgcaaacaggtgacctcccagttaagatggaggggactcagggctcaggaggggcagaaggtccccgtgtcggagagctgggcaagctttctgcaggaaatgatggggatcacggccatgtgagccggcaagatttccctcagccagggaggagactccgggctgtgggaacagcttaagcagaaggcatgggacaggaatgcatatgagagatattgtgggaggagggagggctgcctgggctggcatgcagggtatgggagggggtggaagggctgaggcgggagccatcagtaaaaggacccagagcgcggctccaatgccatggtaggaagcttggcgttgactcagagggcgctgggtaccgctgaagagtgttgagccaaggagggtcatgtcacgggcagatacatgttttagaatttcttcttttctggctgagatgtagagtatggactggagagaagcacaggggacataggaaaggtagttctagaaagaggggctgtcccaccagggaaagtcaaccaactgttccccagtatccattcctcccttccagctcatggcactaaagccactgattgattagctgggtgctatcaatctctctctcatctctctctccctctttctctccccctcatctgtgtcttttctctctctcatctctctgtctccctctttctgtccccctcctccgtgtctcctctctctctcttctctgtctcatatctctctcattgctctctccctctttctctccccctcctgtgtctccttctctctctctctttctcccccatctctctttctctcccccttcctctctttctcctctcactcttcctgtttctctctttctctttcttcctctctttctccctgtctctctcttcctcttttcctttgtctctctctctccccccaactctctctccctacacacatcttgagagacctcagcagtgtaagataagtttagctactccacggcctggcacggtagctcacgcctttaatcccagcactttgagaggccaaggcaggcagatcactggagattaggggtttgaaaccagcctggccaacatggtgaaaccctgtctctactacaagtaccaaaaaattagctgggcatggtggcacgcgcctgtagtcccagctactcggaaggctgaggcaggagaatcgcttgagcctgggaggcggaagttgcagtgagccgagaccacacctctgcactccagcctgggtgacagag[175 bp omitted]ggtggcgggtgcctgtagtcccagctactcgggaggc[137 bp omitted]agggagggagggaagggaaaggaagggaaggaaggaaggaaggaaggaaggaaggaaggaaggaaggaaggaaggggaggggaggggaggggaagggagggaagaaaggcaggccctgatgttcagggagctgagagtgaagtcaccggctccaacccaggatccaaactcaagtctgtctggggtcctatccccgtcaccaccccccgccccgacccatcccccagagacctgggaaggagccaggctcctccggtttcaggaaagggctgcacaaaccaccccgccacgatccctcccagagaacaaacagctcccggccaccggcagtctccctcctcctcctgccaggctggttcccagacccaccctccctgtgtcataagcgcctctccccgcactctcaccagggctggctgttctcagaggaacgcccaggaaaaacctacccgaacccctttcagctgggaaggggacccgcctgggcttcctcaccgccgatgagacctccctcgtcgtacacttagagctgcctgtgttttccttccttccttaagcgggctgggaactctagacactcagggatgggccagcccattagagtaagcattcggccacctctaggctgctacggtcactgctgctgtcaccatcaacgtgactgtctcacacctcacttcctccggccagccacacccctgcagatttaacccgccagcctccctaaggtttcctctgcctgaaatcctctctgcattcctggctcattctcgaaattgaggtcaaagctcagatgccgcctccttccctgaccaccctacctgaagcagccgcacctgcctgctcctagtcacgccgttccttcacctgtttcgtttcctccacagggtttaccacaatctgaaagtcttattcatgcaggtgtctacttgtttatctccccaccacacctactaggatgacaatatcacaagggctggggtttcatctgtctcctcctcctctgtatctccagcacatgaaacatgcttggcacactgtaggtgcttaagtatttgctactacatcactttgggattttgcataggacactcccaatgcttagaatgtcaatctttgcttcattgtccttggcaaactcctattcatcctttgaaaccccatccatttatcccttaaccaggaaaggcttctgtgcctcatacaaccacccataaagctggattagggctttctctggggacacccttgccctgtgccacacttccattagcgcacatatcccccatgaattgtgcacaccagcagggtctagagtacggcacacattttgtctcaggagctacgtattgaataaataaattaattactttttttgagacaaggtcttgctctgtcacccaggctggagtgcagtggtgcaatcgtggctcactgtaccttgacctcccaggttcaagcaatcctcccacctcagcctcccaagcagctaggaccacagatgcaggccactatgcctggctaatttttaattttttttttggtagggatggaatctccctatgttgcccaggctggtttcaaactcctaggctcaagggatcctcctgcctctgcttcccaaagtactgggactataggtgtgagacgccacactcagcctcattatttaatatgtaagtagctatatctctctgagacccagccccatctaatttataacctccctccttctcaagaacatgcctcagctcccattgccagggaatctgacctttctccttgtcataggatttttttttttttttgagtcagaatctcagtcagtcacccagcctggagtgcatggcgcaatggctcgctgcaacctctgcctcccgggttcaagtgattctcctgcctcagtctccctagtagctgggactacaagcgcacgccaccacacccagctacttttgtagagatggggtttcaccatgttggctaagctggtctcgaactcctgatctcaagtgatggcctcccaaaatgctgggtaacaggtgtgaggcaccacatccggctgtcataggaatttgtcagcaaatcctacagactagaggatgtgtgttgggtggtgtgggggtggggataacggaggagatggggggtgagctcttcaagccccaggggagaattctgttccgttcctgggacatcccaggtgagagggaagaaaggccagccccccaagacagctatcccagactgggacagaggcaaaccctgaccacagagccctgtcactcacccaagaacaggtgccaatgacagaatagccaggccgaggggggagagaggtgcttcggtgatggatttccctggtgacttgccaagacagggctttactgcctccgccctggactggctgagtcagactgtgcaggggtggacactttgactggtatttgggaggcatttgctgtgggttacagagagggaggggcctcctttgcggccagagaaggaggaaagaggccctgggccctgggacttgggacttgggtggaggctcgggtttcggtctcacctgctgctccagaccatggcctggagggccgcctgcgccacccccaaagcaatgagatagcccctcctccctcagacccaggagtccaggcccccagcccctcctccctcagacccaagagtccagaccccagcccctcctccctcagacccaaaggcctcggacccataccaaatgcttctatgagatagttttctccccttgttcatgaagaaatgagcccaggcccagtcagatctgcatctgtgtcacagcccagggccactgtaaccttaggctactgacttccctctctgagcctctgttttctcctgtcaatggggcaaggggtctgctccttccctcaaaccccaactcaggtacagtcaagcacagaaaatacttgtggcatgaatgtgatgagaacacagaattgcagaagccaaagaaagagaagcgtaagggccctccttccacccctacctcccccacccgctgctacacgcaccaggaccacctgctgggtagccaggagctcacagtctagccccgctggccacccctgcagcccccatccttcactcaggcagttgcagggcccagaacacccctatcttctaggattgacactggctgtcaaactcatccttcaaggtgattcctggcctgccctcctcctccaggcagcctgtcctcctcctccaggcagcctgtcctgaccctcagcagcctctcctggccttggcagagcccctcgtgtcctcccttgcagcacgcatgggaagaaaggccatcgtcctcgccattgctaacaccagccttgcgtttcctctttgccaggtactgtattgacaactctctataacctgactttatcctcccaataagctgggtgtggtgggtggctcatgcctgtcatcccagcacttcgggaggataaggcaggagtatcacatgagcccaggagttggagaccagcctgggcaacataaggagactctactatatatatgtgtatatatatttatatatagtctgagatgggaggatcaccccagtaggtcgagactgcagtgagctgtgattatgacactgcattctagcctgggccacagaactagaccttgtctcaattaagaaaaaaaatggggataataggacccattccataggatgtggtgaggattatgcatacacacacacacacacacacacacacatttatgatgtactgagaagatataagcacacaataagtatctccaaaattatcaagtggcaaagccaggattcagacccacacctgcccgaggctctctgccatcagaccacactatatctctttctctctgttccttcatccccatcaatcgaaggcaaaaatgtgccttctctgatttccaggctcactcagcatagaccgtggaggcaacatatcttgaatgaagcaacaaagcagtaatgcacatgaatgcaccaaatgccaaaagctcgtttactcaacaagtatctctccaacactttctatgtgctagacccaattctgtgtgctgcagattaagtggaggactgatcacacaaaaatctttgcccttgtgaagcttgcatttttttttttttttttttgagatggagtcttgctctgtcacccaggctggagtgcagtggagcaatcttggctcactgcaatctccacctcccgggttcacgccattctcctgcctcagc[220 bp omitted]aggctggagtgcagtggcacgatcatctcggttcactgcaacctccacctcccaggttcaagtgactctcttgccttggtctcccaagaagctgggattacaggtgtgcaccaccaactctggctaatttttttttttttagtagaaatggggttttatcatgttggtgacatggtgtgatctcggctgactgcaacctccacctccggggttcaagcaattttcttgtctcagcctcccaagaagctgggattacaggtgtacaccaccacccccggctaattttcatattttcagtagagacgtgctttcaccatgttggccaggttggtctcgaactcccaacctcaagtgatcaatccgcctcagcctcccaaagtgctgggattacaggcatgtgccaccgtgcccagcctgtgaagcttgcattctaacggaggagacacagacaaaatgaaccaggaacacagtgggtaagaaggtgaaaagttctccacacaaaaatgaagtagggagagag[131 bp omitted]gctgtctctactaaaagtacaaaattagccgggcgtggtggcgcgcgcctgtagtcccagctactcaggaggctgaggcaggagaatcacttgaacctgggggggcggaggttgcggtgagccaagattgcgccactgcactccagcctgggcaacaagagtgaaactctgtctcaaaaaaaacaaaagaagtcgagtaagggatgccgccatttgaaacagggtggtcagccagtcctctgagaaggtgacattcaggcaaagatcaaaggaggcaagaaagtgaggcatgagggtatctggtagaagagcattccaggcagaggaaacagcaagtgcaaaggccctgaggcaggaccgggtctggatgttccaagagcagcaaggaggccagtgtgctgacacacagaaggaagagatgagatca[144 bp omitted]tctcctgcctcagc[208 bp omitted]ctctcttgcctaggctggagtgcagtggtgcaattatcggctcgccgcaacctctgcctcccgggttcaagtgattttcctgcctcagcctcctgagtagctgggattacaggcacccgccaccacacctggataatttttgtgtttttagtacagatggggtttcaccatgttggctgggctggtctcgaactcctgtcctcaggtgatctgcctgcctcggcctcccaaagtgctgggattagagatgtgagccactgtacccatgcaagtttcttaacccttctcttcctcattttctcatctgtgagacgaagacagcctcccacccagacacactcccctcacggggctctggggagaaatgatgtggaaagctttgctagtaacctctacagcatggagggagttctggaaaagtgatttcagaaaggtgtttatgcctggaaagcctgttcatttttgtgatgtccttggagctgggccaggcattatcgagctaaatcttagcttttgtcagaataggggggtcattgagggaaatttccaaaggaaggtggaacgggatgggtggggaggtaagggcatgagcagaggcagtgatcgtgggcaggaggtgtccatagaagacgggctgccactggccctggagacagaaggtcagccccgggttcaaatccctccttaaccaagtgctgaaatggacaagttgctcaacctctctggccttcagcttcctcatctgtcaagcaggaatcaaacctcgaacttcctcccgctgttagaatttcaagggagttttaaagacagagctttcaactctgacctgtgaacaagtgtgacatcaaatgtactgttcgttgctattattctgttgctacaaggcagacagttagtttcccagctcccctgcagtccccccagcccctcctagatctgtctgccagccccgccccggggtcactccagccaggctgtgccaggtgaatgctcaggtatgcggaggcggaggcggaggcaggacggccctgggagggagcaggaggaggggccggcagcctggaagggaaaggacagcggagagcagggcagagcctgagcaggcaggtaaggagatccgggtcaggagagaagggggccggggcttgaccaatgggtctgagggacggggggactggggtctggactccagggtctcagggaggacgggctgggggtctgaactcccgggtctgagggaggagggcctggggtcctggactcctaggtctgagggaggaggggctgagggcctggactcctgggtctgagggaggaggagatggggcctggactcctgggtctgagggaggagtggactggggtctggactcctgggtctgagggaggaggggactggggtctggactcctgggtctagggaagagggactggggcctggacttctgggtctgagggaggaggggctgggggcctggactcctgggcctgagggaggaggggctggggcctggatgcctgcattgagggaggaggctggggtaggaattagaggctcctactggccaggccttcacatgtttgctggctcccagggcacctccaggtgggcaggagctaccactcagcaccatgagcaccgccacagggtaagcgcccccggaccccaggtcccagccccagcacgcctcccgcctcccctcgcctcctcacccacacccgcttgcggcagcccagactgtttgcggcggcccagactctggcccaagccccgacactcaggaggaagccagagcctctctcctccctgcccagcctggggttaggggcccccactgcagagcagacaggcctgagctccagttcggccctcacactcagtgctgatgtaaccctggtcagaggacatcacctcctggagcctcagcccctcctctgtgacacagggacaatgttgaaaaattggagggatagtgcattacaggacttagctgaccacctcactgacagcaggtgctcaactcataggagtcgctattgcgattgttatgttgttagtaaatattaaccctttgctagaaaatcagggctgtttataatgaagactcaagtcccccagagtaagcagggagaaaaacaatgagagatgagtcaaaatacctgcatggtaggtagtgagctctctggcccagaggtaatcaaattgtggtgacatcagactggcaggagcaggatgaggaacaggagtttgggaaaaagggtttttcagttcccctgacgccacctgatcgctgagcttctgttatgtgcatgcaagtggggattcaagaattcttaggaaaggtaatcttaggaagaaattgaggacgggaggagacagagaaggatgtggttgggaagcacctggcccatgggagtgggaggggaagcagataattccctgtctacttcagataccactaatgctattataaccattcccatttattgagcaacttctgtgtgctaagccctggcagcatcttaagaatgataataacagttattgaggcttcaaaatacttcacctgcatcatctgactgaatttgcccaacagccctaccagatggttactacgttacagaaagaaaaactgaggcaggagagattaaatcctcttctgaaggtcttatggcaaggaggcagtagacagagggtttgaatcccggactatgccatggtagagatcacactcccctaccacccagcaccaccgcctgacctgacctgtctttttttttttttttttttttttgagatggagtctcactctgctgccaggctggagtgcagtggcacgatctggactcactgcaacctccgcctcccaggttcaagtgattctcctgcctcagcctcccacgtagctggcactacaggcgcccaccaccacacccagctaatttttgtatttttagtagagacagggtttcacca[139 bp omitted]gctcaataataataataataataataataataataataataataacccttccatcgctccccattaccttcgtcatgaagcccttgctgccctgcttggcatttccacaggatctgcccccagtcccacagtctctctcattcctcttttcttcaccagcccagaagctgccccaaagccaagcgccaagtctatctatggtgagcggggggcaagggagccccaggcccatagaactgggtctaaagaaacaggacctggcatccagggtcttggaggaggaggggctgggggtctggactcctgagtcagagggaagaggtgctgggggtctggactcctgggtcagagggaagaggggctggggggctggactcctaggtttgagggaggaggggctgggggcctggactcctgagtcagagggaagaggtgctgggggcctggactcctgggtcagagggaagaggggctggggggctggactcctgggtcagagggaagaggggctggggggctggactcctgggtcagagggaagaggggctggggggctggactcctgggtcagagggaagaggggctggggggctggactcctgggtcagagggaagaggggctggggggctggactcctgggtcagagggaagaggggctgggggtctggactcctgagtcagagggaagaggggctggggggctggactcctgggtcagagggaagaggggctgggggcctggactcctgggtcagagggaagaggggctgggggcctggactcctgggtcagagggaagaggggctgggggtctggactcctgggtcagagggaggaggggctggggggctggactcctgggtcagagggaagaggggctgggggcctggactcctgggtttgagggaggaggggctgggggcctggactcctgggtcagagggaagaggggctggggggctggactcctaggtttgagggaggaggggctgggggcctggactcctgggtctgatggaggaggggctgggcctggactcccaggctcattctctttctcccctggcagagcagaggaagcgttactccacagttgttatggctgatgtatcccagtacccagtcaatgtgagtctggggtctgtgttcccccaggacatcttctggggcaaaggtggcctcaggagatagggcttttgaaagcagctaggcccccaagcaggaagcatgtggaaagtcagtttgcccatccataaaatggacctccgttgcctcacctcagtcatggatatgaagccaggggcctcgggtccacttaatctgccagcctttcctccaggccagctgttgtgctggacagtgggaccacggaggcaaatcaagacacagccctgcatgaggaaggggtagacaaggtccagaggaatccacagaggcgcctggtgctctaatggaggtggcagggggcatggcaggagacccgaggaggcatttagaaggagagagctataatccagactccttccctgcccgcaaggagcctccagtctgtgagaagccagactcaggtgctagtcactctgatgaaagggaaacaaagggcactgggaggaggagctgatttgtggaacaggtgatcaaggaaggcttcctggaggaggtgtggttagtctcaggctgaaagtctgattattctgggggattctgagcccacctggcatcatcttgggcctcactgctttctccatggtccgtaccagcacctggtgacgttctgcctgggtgaggacgatggcgtgcataccgtggaggatgcctccaggaagttggccgtcatggatagccagggccgagtctgggcacaggagatgctgctgcgagtgtctcccgaccatgtcacgctgctcgacccggcctccaaggtgccggggggcacgtgggtgggaggagtgtctggggcagggacttcagggggtctgggtgtgaatcttggctcctgcacgtccttcctctgggaactctggcgagggaccccagcccccttcttgagccttaatagcctcatctattaaacagggctgttatccctaaccccctaaccgcctgaggttgccctgacctgctggcccacactcccgtcgccatttagtagtaccatcatttcggggcctcagtttaccccgccatcccacccggcaggaggagctggagtcgtacccactgggcgccatcgtgcgctgtgacgcggtgatgccacccggcaggagccgctcgttgctgctgctcgtgtgccaggaacccgagcgcgcgcagcccgacgtgcacttcttccagggcctgcgcctcggggtgagcagatgggctggctctgggggtggagctggaactgggcggagcctggagccggggcggaaatgggtggggcctctaggtggggcggggcctggggctaaggcgggatcagagcaaggaagggcaggggacctgggaaggaagttctggaaggcagtggggtttgagattggacccagggtcaagatagaacatgaaggtgggatgaggacatgaacagaacatggccaagaaggatctgggggagcagccaggacgaggtgggggcgaggaaccacccggactgggtctccatgggcggggtcgtggcttagggcagggacaggtgtagggcgaggggtgagttcggggcgtggacgtgcgtgggttcacaggtgtgaacggtagccgcacgtgggctgggactgagctgaaaaatcggccaggggcgaggcccgggtaggaagtgggtgcggcgtggggaggcgtggcctgacggtgtgattggcaggcggagctgatccgagaggacatccagggggctctgcacaattaccgctcgggccgcggggagcgcagggcggcggcgctcaggtgagagggaagaagttggcagggtctctgggaagccggtttcccctccttgtgcctcagtctacaacaccagcctggaacagaacaagagttttgcatggagtcaagcacaccctagtcgagtcttgtctgtacctcccagacgagctgaccccttctccagaactctgcttcttttctctgttccctgtccaggccctcagtttcactctagagaggtgctatccctccgtatatcggatttctccctacctcgttgaacttgttcactccctttgagccttttgagcctgtgtgtctcgttctgcgccctggatttccccctccctggacccctcagtggacccagtcttggtgtccccgtcgccctccgcagggccacgcaggaggagttgcagcgcgaccgctcgcccgccgctgagaccccgcccctgcagcgccgcccgtcagtccgcgcagtgatcagcaccgtagagcggggcgcgggccgcggacgaccccaggcgaagcccattcccgaggcagaggaggcgcagaggcctgagccggtggggacctcgagcaacgctgactcggcctccccggacctgggtccccggggtcctgacctggcggttctgcaggcggagcgggaagtggtgagccgctaaggaaggggtctgggggcagggccaggcgactggaggcggggctagggcgtggaagggcggggccggctgcgggacgggcgttctctggtcagacttctgcgttatggaagaggggctgggtcgggggcggggcttggttgtggggcgtggccaggtgtttggggcgtggcctgatctggggaagtgtataggtgctcaggttcagggcttcgacggggatggttttggaactcgggagccctgagcgtccccctcctctgtcccctaggacatcctgaaccacgtgttcgacgacgtagagagctttgtatcgaggctgcagaagtcggcggaggcggccagggtgctggagcaccgggaacgcggccgcaggagccggcgccgggcggctgggggtaaggggcaccctggcgtgggatctgaaccccctcccgatctcttccaaatgtccccgctctccccaggctctcccctcccgccacttgccagggctgacctcaccgccatcttaaccgggtgtccacctctctctgcctgcctggtgctggccccgcgtccccatcgccgcgcccgtctgctcccctcagagggcttgctgacgctgcgggccaagccgccctcggaggccgagtacaccgacgtgctgcagaagatcaagtacgccttcagcctgctggtgaggacgcgcccgcccctgggccggggcgcgggcacgacgaacctgtcccgtccccgcacccacgccaaccacctccctccccacgccccaggcccggctgcgcggcaacatcgccgacccctcctctccggagctgttgcacttccttttcgggcctctgcagatggtgagacccgccccaggccctcgggcccccctgcagcgggaggaatcgggttcgacttgtagaaggtgtggcggcacagcctgcccctcctgctcccctgacagattgtgaacacgtcgggggggccggagttcgcgagcagtgtgcggcggccgcatctgacatcggatgccgtggcgctgctgcgggacaacgtcactccacgtgaaaacgagctctggacctcgctgggggactcgtggacccgccccgggtgaggggcggggctgggaggcagggggcatggtgattggaggagcataaggcgctgggaggtgggtggcatgatgattggaaaataggactaggagagtagggaggggttagaggcgtggcttagttgtgttggggcggggcttaggacagatgccaagattcaattggaggaaaggccaggaattaacgtgaaggaaagatttaagaccaccagaccaatcggattgaaagaaaaggggggcttaaaggaatagaggggctaggggctacggggcaggggcggggctacgcgaaggggcggggcttctggaaggtttggtctataactttggtgatgggacagagtctgtgcactgcgggctggcagttccgcagggaaagggtcagaacctgaaaccgaccttacggaaaacctgatttggaatcaggtgagatttagaggctggataaggcaatttttttccagagagagagatggatggggtctcaatattttgcccaggctggtctggaactcctggcctcaagcgatcctcccatcttggcctcccaaaatgctgggattacaggcgtgagccaccgtgcccggtctagaaatataaattgctgttgagttgggcttagagctaccggcaggacttggtgaaaagtggcggggctagaatcgttggaatacagcgagctttaggggaaaacttagtgaagttaatgcaggaacgaagttgggggctgtatcaggatccctgagctcttggccctgtccctggccgcaggctggagctgtccccggaggagggacccccatacagacccgagttcttcagcggctgggagccgccggtcactgacccgcagagccgcgcctgggaggacccagttgagaaacagctacagcacgagcggaggcgccggcaggtgacccaagcgacacagcagggccgaggctgggaagtccgggggcgcggccggtccgcctggccccgcctgacccgactgtcttacttcctacagcaaagcgccccccaggtcgctgtcaatgggtgagtgtccgccccagggcagggcaagggggtcaaggaggggtgcgtcccgggggctcccgatgctgactccgccccctttttttctgtgtttttccttctgtcttcctggctcttctcaggtgggtgagatggtgatggggcgggccggggctgggagagagggaggagcagggtgggagggggcgggacccagacttctggggctaagggagttgggaatggagacccggattcctgggcctaagggaggaagggggctgggagtgggtaaagtctgagaggttggatccctggatccccaaaaggctggaagaagccagtttgttttcccagggcctgggaagcaccatgcctgggctccctaggaggacagagccctggatattggaggggagaggctggggaattggacctttgggttttgaagaagagcccaagtctggtgcttgggatcctggagacccagaggagcaggcttgggacttcaagggcttgggggcaagtttctgggaaagttaggaagtggtagtatctctgggcccccgagaggggtaaaggctggacgattaaactcttggttttccagaggctctaatgcaattgtctaagtcgctgctgggtgtcggactgggttaaaaggtttgagggttaaaaggataagattgaagcttgagacctggactcctaggtccctgggggaggaaagaacattccaagtcatggttctaccaagcagtgggggctcagactctgggtcctgggggagggaaggaggtagatggactagaactctagggtccttgagcaaatagagggcagactggagggaagcaacgtgggaggagacgaaaacaaagcagtgaggctggaggagacaaaggggggtctgggtgagggcccgagcagagggtctcagcagggacagcgtgctgggagctgccggccccacacagggggtgccgcggccctgaagaccccccctctcccctgcacaggtaggcctgatccaggctgaggtccctcttattgggggtcagagctgaaatcccacccctgcccccagctgcctgatatcgcaaccctggtccctgttcacagcttcaagtcactttctccgagcctcaagttcttttttgcagggaaactgggaataatgattatccgttcccggaacagtgagaagtctgtggtgttgtaggaactagcagttaagggcttaaggctgtgaccaggttcaagttcaagtccagctgcctgcaaactaaggcagcattattcagacctgggctaccctggtcccgggctggcgatgccactctcttactctgtgacctttacatccctgtgcctcagcttcctcctctgtgaaaatggaggagatcatagggtctctgggggaggaagaaactgggggagagaggggagtccaaattcatggttctaccaaccgttgtcataaagatcaaattaactaatatacgtaacagaacagtgcccagcacacagtaagtggtacagaagtggtagctattgttttttgagacagtctcactctgtcatcaggctggagtgcagtggtgagatctcagctcactgcaacttctgcctgccaggttcaagcaattctcctgcctcagcctccagaatagctgggactacaggcgcgtgccaccacgcccagctaatttgggtattttttagtagagacagggtttcaccatgttggccaggatggtcttgatctcttgacctcatgatctgcccgcctcagcctcccaaagcgctgggattacaggcgtgagccaccgcgcccggcctagctagtgtttttattatgcttatgagttatgatatataaagcccagtgcctattagatgctcaataaatgacagctgtttctagctgtgtgatgtgggcaagtcattttctcgctctgagcctcattctcctctgtaaaatggaatcgatggtgggatagtacccactacatatgcctacagcacaatgccaagcaacggagggagcaaatatattcagtctgttattcttgtttcaaatttctattaacagtattaacccggcccctgctgtgcccccagcttggctctaaccccagctcacaccagcaccctgcagcccagagcaatggggctggctgcctccttatctccaaccctcccgcttctcctcagtcaccgagacttggagccagaatctgagcctcagctggagtcagagacagcaggaaaatgggtcctgtgtaattatgacttccaggcccgcaacagcagtgagctgtcggtcaagcagcgggacgtactggaggttagaggagcgggaggctgaggggcaggaattagccagccctagctgcagacaggctctgaaccctctgttctttaccacacccaggtcctggatgacagtcgtaagtggtggaaggttcgggacccagcggggcaggagggatatgtgccctacaacatcctgacaccctaccccggaccccggctgcaccacagccaaagccctgcccgcagcctggtgagccagcgcagacgctgggatcttgagggtggagaggctgggaccagatcctgggaacaaggggcgtggggatcagctgtcaagagtgctggagcaggtggtgactgggggttcagaaatgcatctccagaaaggggagaggctgggactctgagtcctctccctaacccaggtactctcctctccttcctttcagaacagcactcctcctccaccaccagccccagccccggccccacctccagctctggctcggccccgctgggacaggccccgctgggacagctgcgatagcctcaacggcttggaccccagcgagaagggtgagtggtggggacgccggctgcggggagcggtccttatccttgctttccaggcagagaaacgggggctcagaaagagcaaagggactcccgtcccattctggggacgctggagcgcccccccgccccgccctctggccccaggacccctcgccctgagcccgcactccctacctcccggtttcccgcctgcagagaaattctcccagatgctcatcgtcaacgaggaactgcaggcgcgcctggcccagggccgctcgggaccgagccgcgcagtcccagggccccgcgccccggaaccgcagctcagcccgggctcggacgcctccgaggtccgcgcctggctgcaggccaagggctttagctccgggtgagtggggccggggccctctcggcgcgggttgatacggacgctgggagcggagcgttccgatcggccgggagtcggggggcggcagtcgtggagaccacagggagccgggattagcccgaagtgagggtctgtctggtagcaacacccaatggcaggctgtgattgccatgttttttcagactccgactggattccttagggaaatcccgtaccctttgaaagcaggatgcggccacgccccccgggtggcaacattgtgattggtgggtggggttcaggaggtgtcgggcctgcccccgctagagctagaatgctgttctgattggaccatcgccgggtgggcgtgacatgattgtccgggctggggcatccgccgaccggcctgaccgcgcccgggctgccctcgctcaggaccgtggacgcgctgggtgtgctgaccggggcgcagcttttctcgctgcagaaggaggagctgcgggcggtgagccccgaggagggggcacgtgtgtacagccaggtcaccgtgcagcgctcgctgctggaggtgagccggaccgctggtccctgggtctgggtagggttgggatgacgagggctcggacgccaggacaaagcgatttccaccccgccctccaggacaaagagaaagtgtcagagctggaggcagtgatggagaagcaaaagaagaaggtggaaggcgaggtggaaatggaggtcatttgacctgccaggcgcccttcgcaaagagtgacgaggccccgtgggagaacggactcctcagactctccccaatagcggaagtcgatcttctgaaggatggccaatctgctccggccctggtcttcccccatcccggtggacagacttaacgatccttgctgcagtccctccggagaggatctggactggctgggagtggggagggcgtggagacagtctacggaaagcgctagcagacccccgagagggtgcagtggagccctgagcattgtaatatgcggcccagcctataaacagcctccgtgcttagcagatggtgtgccaactgctgtcctctacccggctaccagggggctcagaaacctgcccctcgacccagtcacagcctcatggaacctggaaaatgttccaccctctttggtttctctctgaaccctcctttccatccccagggtcccaaaccaggctccctcctgacctcctagccagcctagtccagcttgccccaccttcacgtttccctggctcgcggctgctgggcatgaggctttgtgtctcccttcccgcctcaccaacgttctcacttcattccttcctgcgtcctggccctgcccttctccaaacgctcccaagcgttcaacctctgaggtttgcacctgctgtctctgctggctgaaacggccattccctgcctggcgaactcctgttcagcctccctggcccagctcaaacactcactgtggggaagcctgccctcatccccgaagctagtttcccagcatccacttctccattttgtcccccacctcctgccacggccctaccaggtagaactggctgcctcccaagcatgccacagctttctggccactctttgttctgggagatggcagccaactgaaaacttcctaatccctcaagaactagctccttctccctctggcaagccctgtaactttcttttccccattatccaggtggctggtaaggtctgcttttctctggatcccactgttttccagactggatattctctgcctttgggaagaatggccctttctctttctcccctggctctgccttccccagattactgagggcctctgggcctctgggcctcaagcctctcccggagttgttccaacctgggccaccagatggcgccctccaagatgggaaaggatcagagagacgcccccccacccccaccccgccccccgcccttggggcaggcaggagttctcagtccccactttgccacctcctgcctggttccttctggttccttccttcctctttggatctccaagagtccttctcctatctgccccgtccctagatcctattcacatacttcccttggctccctatggctcaccggataaaaccaggccccagcttggcagtcacaggttgcccactcggctcaccagcttctccgaccacggggctcagcttccctcctcctgctgccaagcttggttcatgtggttgcttctgcccagaatactctcagcccctctaccacttgcccggggccccacccctcattcttagtaggggaataggaaaggtaggcaattcccccaaacctctttgctccattcccgcacccgccccccgccccccaataagcccccgtggctctcgccacctaggctgcaaactgaaatgcctgcaggaacccgacaagagacccaagtgagccagccgggcctcagccctacccccgtcacaggccagcttgtttgaacatcctggcagctgtatcttccaatattctcagaacctgaccatctctcaccatcttcactcccatcaccccagccagagccaccctctctcttgcttggatttcaccagtagacccttagctggtccccccaatcctcaccaccaacccccagcctgttctccatgccagagggacctgttaaaacctaagtcaggccatggccatgctccaaaagacacccagagctccaatctcacagctcaagcccttcccagggccaagtctccacacagccaccgtgacctctctagcttcattccctgctttctccagctcctcagcttcctgcagcacaccaggtgccctaccccagggcctccacacacacagctcccatcatccctcaaatacctacacagctccctccccagggtctccacacacagagctcccatcatccagagcacccttccctcaaatacctacacagctccctctccaccaccttcaaccatctgcctgcaccagcttttccctgaggcctgcctagaccactctattcaaaacacatgtgcacacacgtgcacccaccttcccaacccctttcttttctccagagcgccgccaccttgaaatacatttattttaacatcggatgcccccctcctaaaagtattggatctttgttttgttcagtaatgatcagtcacactgtactcactcagtcctgttcttcctgttggtgttatactaattgttgaatgaatgcctcatctcagaagatggctcctactcagctctagtcaacggtggctatgcaggactgaaaagttcatattgtcacagattcctgttctttcaaaagaaggcaaaattctttttgttttttgtttgtttgtttgtttttgagatggagtctcgctctgctgcccaggctggagtgcagtgactcgatcttggctcactgcaacctctgcctcccaggttcaagcgattctcctgcctcagcctcccaagtagagtagatgcgattacaggcacctaccaccacgcctgctaatttttgcatttttagtaaagaaggggt[146 bp omitted]aatgttggcaattgactaaatttgtttcaaagacactgatggcaaaacccaaactccccagctccacatccttggccccagaggtcttgcccgctgatccctcctgccccatcagcttcccctcagccccccgcctgcgatcacgcgggctccgtcttggagccttcgctcccgctgggggctcatcctgaagctccttcaccacacaggtgagtaagcaccagcccatcccccggcacccacccaagtggcccagtggtttggtcatggacacgcacggccccccagcaggagcaggaaacagtgccctccctctggctgggaacacagagcttgagtggcaacttcacgacttttatttgtggtgcctgtgctttatctcgaaaataccttctccccctgccccagacagtgggcggggagggggcagcaaaaaatagaagacgtccctccctattgcacatggaccctatatacaggcccacctggctgaggctggcgggactcttggcacattcttggatccctgctcaggaggggaggggtgacggggtggcatcacacgtgagatggggacctccaggcggccactctggtcctggctactgatccttgcacttcttggtcctcagttccttcctggtcccgtctctggccctggtcccctctggcaacgtccccctgcttggctcggcctcccacctccatcctggcctcgggtggccccctcggctcctggggactctgctcccctcccagtccggaggtcccaggggggctatggcttctctgagacttcccccggagccctgtcactcgtgttcacacgggggaaggggtgcgtgtggcagaagcagctgtataaatacgggtgcgggaaagtccctccgggtcacttggagagtttgctgatgacgcggatcaacgctgcattctcatccttgaggcgctggttgtcagcgcggaggtcagacagggcctgggggacggcaagggtcagctgggcagccctggcgggttgcacccccacccaccctcggccctctgcccacagcccccacagcccccaccttcagctcctcctccagctctgcggccttgcgttccagggccctgcgctcctggaatgaacagggaaagtgcagaaactgagtgaggctgaggagggcaggggaaggccaggggccagctgggaagggcaatgtggctcccttggtccaaacttagggatgtgaggctggggacgcctctggcccccatccccactgcccctactcacgaatctctccagttccaggagggctggcctctcagcgaagcgttcttgcctctggtgaggacacagaaagcacaggggtcagcagaagaagccagcactgctctgaagggtcctaggctcctgctgggcacccgcccgcccactaggcagcccacaagcccttcccccacgggccaggccccgccaccggcaggcccacagccccatcccctcgctcagactccgcctccgagatctcggccccgcccctcaagtgaagcccagccccgccggcacccccaggccaggctctacctcccagcagtctaagccccacccaggcggccctgccagttcccgtgaccctggcctcggcgcccttacctgcgtggcccgctccagctccaccttgagctgcgccagccgcagcgtggtctcggtcagggcctcgcgaagccgctcgttctccctgcgcagctctgcatacagctgggggtcaggtagaggagggtcaggtggaggatggggcgatgctgggggggcggggaagccaggaagctgggcacccagcaggcaaagccccgacggaggggtgggatcgcaccgtcctaaagcctccgtctggctcttccgattctggctcaggttctgggttgaggtcccgctgccaccgctgcctgcgggccgaggggccgccctccagggtgctggggcaggggaggagcgcgcgtcaggggccggcccggcccgcacgcagaccccacctctcccaccccgcccctacctggactcctggctgcggtcagccggctccgcctcctccccctgtgggcaggtagacgggggttcaatgggtatgggagggactttagcgggtatgggaagggctttgcccgccccccggcccaccctctgcaccagctcggccccacctgagcccctcacctccgcaggccccctccactcctttccgaccttgcggtgctccctggccgcctgcggtcccggaccctgcccgtcgggcgcctctgctgggggaggggcaggaatcagcccaggcacctccagagccccctctcggtgcctgggtccccgggtcaagcccccaggaaagcaagaagactatgggagaaactggatgattccctgggaatgacctccccgagagcagacctcacctctctgggcagggctgtcagagttctccactccagggacgcggggccttcgggaagggtcctgtcgggagggggaggcgagtcagggaagcaggacatcccgcaccaccccactcgccctcgctgacccctctcaccaggctctgcgccggcttctctgactctggggccttccctgcagccttctctgcctccttcaggtctgtaagagtcacaccctggcagggaaaggggacagtcaggggacgctggggtcagggcccagcccctcctccctcagacccaggagcccaggccccagcccctcctccctcagacccaggagcccagaccccagcccctcctccctcagacccaggagtccagacctccagcccctcctccctcagacccaggagtccaggccccagcccctcctccctcagacccaggagtccagacctccagcccctcctccctcagacccaggagtccaggccccagcccctcctccctcagacccaggagtccagacctccagcccctcctccctcagacccaggagcccaggccccagcccctcctccctcagacccaggagtccagacctccagcccctcctccctcagacccaggagcccagaccccagcccctcctccctcagacccaggagcccaggccccagcccctcctccctcagacccaggagcccagaccccagcccctcctccctcagacccaggagcccaggccccagcccctcctccctcagacccaggagcccagaccccagcccctcctccctcagacccaggagtccaggccccagcccctcctccctcagacccaggagtccagacctccagcccctcctccctcagacccaggagcccagaccccagcccctcctccctcagacccaggagtccaggccccagcccctcctccctcagacccaggagcccaggccccagcccctcctccctcagacccaggagtccaggccccagcccctcctccctcagacccaggagtccagacctccagcccctcctccctcagacccaggagtccaggccccagcccctcctccctcagacccaggagcccaggccccagcccctcctccctcagacccaggagtccaggccccagcccctcctccctcagacccaggagtccagacctccagcccctcctccctcagacccaggagtccaggccccagcccctcctccctcagacccaggaatccaggcccccagcccctcctccctcagacccaggagtccaggccccagcccctcctccctcagacccaggagtccagaccccagcccaccccacacctgtgtggacctccgagactggcgcatgagacgggagcgagcttttctctgggattccgactcctcatcccgcacaggcatctggtaggacctgagggaagggtcccaacctcagacagggaacctggggaccctgtcccattccgtggctgacaccctccgcgggaagcaagttctgtgggaggggactccaactcccagcagacctgaggccagctctccctcaggagcccacccaaagccccgggactcctgcttcacatcgtctctccctgctgggggcgggggcggcagcttcctgccctggcctcttcacctccgtcggtcccgggagtccgctgggggcgccgtggaggctgtggggacgtttggcttcgctggggattcaggctccggaatcctggagggaggcgaggagttctccaagcaaggaggaggcttggtgacctcagacctgcatcaattcattcattccacaaacattacccaggtgcattgtgtgccggcactggagatgcagccgtgagtgaaagaaacaaattatctgggccacaacagagtcagagctgagcagaaatacacaaaacccacaaaagccatgaaaagaccagcacactacgcaaccggtcagaaggataaaggactctggacagaagcagcagtgcgagaactgagagcgggagggtgtgcgtgtgcggacggcgccgtggtggcagcagggtggtcagtgtgcacctcggggtggggggaagataggggagaaggtgacgtttcaacacagacctgagggagggagagagcccccaagaggaacacagcacaggctctggagtggcggcaggaaccagaccccagggggtacatggtctcactcaggatcacacggacaggcttggaacccacatctgccacccacccctgaggggcccaggccctggggactcacaggacagagggctccggcagcttcggggagggggtcggggtaattctggcaagacggagctccttggcctgtgtggagaggagaaggggaggaaggggcagttccctcgactgggcaggggcctgggcctggacccggcccaaccctcactcacctgagtggaggtcccttccagccaggaggaggaagccgagcgctgcagcccagccccaggggctccctccgctgtccgcctttcagggggacccagggcaccagaactccctgtcttcaggaggccaaagcgcctggagaagggggcctcttcaagctgctgggagaaggaggaggtctcagttagagagaaaggatccctcttctcagacctcaagggttagcccccaaaggactgcaacaaactacaattcccatcagcccccggggcaggcacagcctaaaaaggaagccggttgtccaggacgactctgggaactatagtcttccccctatctgcccctgccagaggttcacaggctgtatggaatcccacctccgggccctcccagcctcacaggacctctcagggcatccactcaccacgggactcttagggctggggtgcggcggggaggagacgccattgagggttctgggttctgcagggggtggttctgtgatgtgggaacaccgggcaggtcacagaagatgccagttgcctctagattcagagaacccgacccctcctccctcggacccaggagtccagattcaggcccctcaccggtgggaccttcttccccctcatcctcgtcctggatggggggccccccagccccaccaggccggcgctccttggacaagtcctggagggaaatcttctcgcgactgctcagacgacacacagagctcctgttggggaaggagagggtgctggggtacaagcccggggcctccagccaccccgccagccctggactcctccctccctataccttctgtgtttgctgctagagggcgcttggggctcctggccccggctctgggaagcttctttttggttccgaagctgcaaggagggaagggggctgcaggggaggggtggagcacacgtgccccacagcaacaccaccacaaacagctgtgcaggagctcactgcccaggcgggcaccgagggctcgtgggcttactggttttcctacagatggccacacacctcaggggcaggaggtgccctgcgtccagcaggcgcccgcagctgccacgtgcaggcactgccgtcttgtcctcacggcccccacccatgagaagcctccagtctcatccccagaggggtccttctagctcccaggggagacctgcttagacctcaccccgacccctcagcatacccagggcactggtgggccctcagctgccccggctcctgcagccggcactcgcctcctccttccccgcgcagttcaccaccgtcttcacaccttccccgcagttcaccaccgtcttcgccccttccccgcgcagttcaccaccgtcttcaccccttccccgcgcagttcaccaccgtcttcgccccttccccgcgcagttcaccaccgtcttcgccccttccccgcagttcaccaccgtcttcgccccttccccgcagttcaccaccgtcttcgccccttccctgcagttcaccactgtcttcgccccttccccgcgcagttcaccaccgtcttcgccccttccccgcgcagttcaccaccgtcttcgccccttctccgcgcagttcaccaccgtcttcaccccttccccgcagttcaccaccgtcttcacccctaccccgcgcagttcgcagttcaccaccgtcttcaccccttccccacgcagttcaccaccgtcttcaccccttccctgcagttcaccaccgtcttcaccccttctccgcgcagttcaccaccgtcttcacaccttccccgcgcagttcaccaccgtcttcacccctaccccgcgcagttcgcagttcaccaccgtcttcaccccttccccacgcagttcaccaccgtcttcaccccttccctgcagttcaccaccgtcttcgccccttccccgcagttcaccgtcttcaccccttccctgcagttcaccaccgtcttcaccccttccccgcagttcaccaccgtcttcgccccttctccgcgcagttcaccaccgtcttcacaccttccccgcgcagttcaccaccgtcttcacccctaccccgcacagttcgcagttcaccaccgtcttcgccccttccccacgcagttcaccaccgtcttcaccccttccccgcgcagttcaccaccgtcttcgccccttccccgcgcagttcaccaccgtcttcaccccttccccgcagttcaccaccgtcttcgccccttccccgcgcagttcaccaccgtcttcacacctttgtactgggagggcccttcattcctgcccttctagcaaactcttagtgctgtagtactcacgtcttccagaaagtgtccccagatgctcccaggctggtctccccccatatctgggccccctgagctgaccctgccccacctattaaacccctcatggccgtatcaccctcaggatggaagccaccatgctcctcgcctggcactcgtggccctcccgggtctgccctgccttacgctcccctccctgggcacctcagggcacccacacttgccccccagcctgtgtgagatcttctcctacatccatcagcctccacttcgctcctgccaacctttcaaaagaggaagctgtctccgctcccctgcccacgcaccagaagccctaggcctggccttgggagcttcctgtcacctcacagagctcactgaacgctggcatggctctagtgctttccaggggcacgtactcccccgagctcctgacagcacaatccacgtgtcacgcatgacccctcatacagttgcgcaccataccattcccatttgacagataaggaaactgaggcccggaaaggaaagtggctggctgagactcacggcagatccatggcagagccgggattccaacccaggcagtctggccaaggctcacgcccttcactccttcactctaagttttcccagcaaggctgccccggggatggctgggggacaccttgtgggtgaccagcccagcctgagtctaggacaatcctgcacatggctgctgccaagggccaccctgaggtgatgaggtgtgctaagcaacctcatcagggtgtcagacaaccctgtccaaatccttctgccgcccccaccaccaggcaggcaggaagctctgcagccccatctctgtcctgccccggctgggggtctctcctgaggctggggctggggctgggtcaccaagagggaaatagcaggtcgctggggtggtgggtgtcagaagtcgggggggttccccctctgcaccctcctctgaggagctgaggggacatggggagtctggggtaagcccctcagccctgacactcacgtcctcctgtttccgggccagttcctccaacaggctcagtacttcctcatcggccaggtcacagggacgctgcccctgggtcaggggaggagcaggatcagacaatgaaggaggtgctgggccctccccacgccctgcccctcaccagcctgggcactggccctcaccgcatgggtcagtgagtccatgcccccgccatgctcggccagcaggcggcaggcatcctccacgccccagtgtgccgctgcgtgcaggggagtccagccgtccccgtcccggagctctgggtcgtagccagcctgaaggagcaacctgggggccagggaggctcagggtcagaggccaaggcggggcccttggccgagggctgatttcggccagcggtttggtaacgaggtcccaggccacgagactgaaacgtccctggacaggctggtaaagagccactgcccagcatccgctgccacaagaggcccctctgcaccaggccttgtccctccccttggaccagcagttacatgttaaaccctgaccctgcaggtggcctctggaacctgctcctggtgctggcagggggtcaccctggctgtgggattccaaggtggcagcagcggggtgtaaggaggcagctccggaggatgcaagtgcaggacccttgccagcccccatgcctgtcagaaggatgggacccccaaagggctgtctcagggcagtagtgctctaggacccgggctggcttaaagcagtgactcccaaccagggcaatgctgtcccccaggggagacccggcaggtctgcagacatctttgttgtcataacttagggcaagggttagcggcatcggctgggtggaggccagggaggctgctccacacccggctgcgctcagagcgctcagcagcagccccacaaggagagggacctgacccaacatgctgccagcgcccaggctgagaaaccctcacccgagacagtgttctgcgagaaaacaataaccaccttaaaccattcaatctgagggcaaaggcagggttacaagtccaaggccactctccaagctcagcttaacggtaggacgtgtctatttttggagaactggaatgagtttctgtgtcaatgagaaagagcttcacaaagtgggaacagatggacagcctgggatattctacaaagaggccttataagcacaagtccctctctctggtcccgcccaccttgcccttcacctttcccacgctttgcccggagctcaccctgccccagctgtgctgggccctcgctatttccccaagcgtccgctcgccgctggcctctgcacttgctgctctcagccgggcagtgttctgtgccctgcagcatctcacgctgagcccctttttggcagtcaccaccccctcatccccctgtctcctgaccccaaagcccctcctcatcacacttgtcttctcccataaccctatttatatcttaagccagcagttctcaactggggcaatgctgccccccaggggacatttggccacgtccagagacatttttggttctcacaaccagggatgctcccaacatcccataggtggaggccagggaggctgccccacatcctgtgatgcatgggacggccccgcagcaagagcgatcagcccaaaatgtctgtctccccacgaggctatgagccgcacacaggcccagatctgtcttgtttacccatttccctggcacctaacagactgcctggcacacagcaggggctcaaaaataagcatcgaatgagtatcatcaaataaacatatacctctactctgcaacaaatgtttttttgttttgttttggtttggttttgttttgagacggagtctcacactgtcacccaggctggagtgcagtggcacgatctccactgactgcaacctctgcctcctggattcaagcaattctcctgcctcagccttccaggtagctgggattacaggcgcctgccaccatgcccagctaattttttgtatttttaatagcgacggggtttcactgtgttagccaggctggtcttgaactcctgacctcatgatccgcctgcctcgacctcccaaagtgctgggattacaggcgtgatccaccacgcccagcctgcaacagatctttgatgaggagaatgctggttacattattttaaaaatgcagtcaggctaggcacagtggctcatgcctataatccagcactctgggaggctgaggcgggcagatcacttgaggtcaagagttcgagaccagcctggccaacgtggcaaaacctgtctctactacaaacacaaaaattagccgggcatggtggagcacacctgtaatcacagctactcaggaggttgaggcaggagaattgcttgaacccaggggacagaggttgcagtgagctgagaccgcgccactgcactccagcctggcaacagagcgagactccatctcaaaagtaaaaataaaataaaaaatgcagtcagtaggtctgagtgtaaacatgtccccttacaaaggagcagcaatgacactatagtcatgaatatttctaagtccaaagtgcttcacttccacgaatatggattccatttctccctctactaacagtacccacacaggccccctggccggacacaggccacccagctgaagacaaatctccaactgttccttgcagcgaggagcggtcatgtgactagcgtctggcaaatgggatgctggcgttaagtggtgccgcttgcggactgctcttttgaaaggaatggatgtttgctcctttgccccctctctcttcctgctggctggtatgcaggtgcagtggcaggagatgaagccgcccccaggactcaggggtggaagccgtgggaggaaaaggacacggcctccaggcctgggcacatcactaggcccaaccatttagagtttccagtcccccttgtcgtaaggatcagctcagggatgggcccagtcagcaacagagctgggacttggccagacactgaggtccaggggctctgcttcagcaggtgctaagcagaagggacagcggtctggagctgttacgggtgctaggccgaagggacagcggcctggagctgttacaggtgctaagccgaagggacagcggcctggagcggttagaggcatcttatgtacctcaccgagaaaacctgactaaaaactgtcaacatagagatgagcagagacagggaggaattcatgttaacttcatttttatactaaataataaagtatatgatcacaaaagagagaagagggaactgaaaaaagaatgaggagcctgaggatgagaactggaaccaacaactttaatagaaaggggaaaggcagccaaataggaacaaaatctaagactgaggtgaggatgacagaaagggaatgtgtactagaacaatttaaactatatatgcaccttggttgggtgcagtggctcacgcctgtaaccccagcattttggaagactgaggcagggagattacctgaggtcaggagttcaagagcaacctggccaacatggagaaaccccatctctgctagaaatacgagttagccaagtgtggtggcacactctcatagtcacagctcctggggaggctgaggcaggagaattccttgaacccaggaggtggaggttgcagtgagctatgatcacaccactgcactccagcctaggtgacagagcgagactccgtctcaaaaacaaacaaaaataaactatatatgcaccaaataatctagtcttaaaatatatacaaattgtaactgacagaactataagaagaaacaaagtccataatcacagcaagaatttaaatgcacctctcatagtaactgacagaataagcagtgggtgaaatatcactaaagataaagaagcactacaaataaaacagcatgattacaaggttgacctaataacctacagagaacactgtacctgatgacaccattcttttccgacttacatgtactggggtatataaggtaaaacgatacatttcaaaagctagaatcatatggaacccattctctgaccacaatgcaattaagccaggaaaatagtaacaaaatgatgactagaagtcctatatattttgaaattaggccaagcacagtggcttacacctgtaatcccagcactttgggaggctgaggtaggaggatcacttgagcccaggagttcgagacaagcctgggccacatggtgaaaccccatctctacaaaaattagcggggcatggtggtgtgcgcctgtagtccccactattcaggaggctgaggtaggaggatcacctgagcctggggagtttgaggctgcagtgagccacgactgtgccactgcactccagcctgggtgacatagcaagaccctgtctcaaaataaataaataataaaagattacaaattgggaaatattttacactgaatgacaataaaaaaaagactgcacatcaaaacttgtgggtacagctaaggctgtatttagagggaaatacatagccttcggtacatacatttaaaaagaaagggaaaggacaagatccacaggaaggtataagacagcaagatggaacagactggcccaactcacctcatcacctcaatgtagcccttggcagcagccacgtgcagggcagaggcgcctgtgcgggggtgccgggcctctggcatggcgcccccattcagccagcacctcgtgtcatgaaggagcaattcctcttctgcccgcttggctgcttccacatccacacctaggaggataagaggcacgaggtaggactcacaccccatgacctgaaatacccagggtcatacactgggctggccagggttcagcccagtgacttgcccagagctcttccccctgctcccctctgagactcaggaggcccagactagcccagttgtttcccaactgtactccatgcagtcgtgtgtcccactcagggtctctgagtcagcgctaagcactgggaaaacggagatcacaggcctttccccatttcaaccagaaattcaccgtatttttattatttttaatataaaaccatggccgggtgcagtggctcatgcctgcaatcccagcaactttgagaggccaaggcaggtggatcacgagctcaggacttcaagaccagcctggccaacacagtgaaaccccatctctactaaaactacaaaaaaaaaaaaaaaaatttagccaggtgtggtggcaggtggctgtagtcccagctacttgggaggctgaggcaggagaatcgcttgaacccgggagttggaggttgcagtgagctgagatcacgccactgcactccagcctgggcaacacagtgagactctgtctaaaaaaaaaaaaaaaaaagtatatatatatatatatatacacacacacacacatacaaaaatataaatataaaaaatatttatatatataatatatatataacatatatatgcatctcctatatatataacacctatatatacacatttcctatatatataaaacctatatatatatctctcctatatatgtaacatatatagacagaagtggtaatggtgataaaatgtatgaagatgctggattaagattatattggggggtggcacaacggctcatgcctgtaatcccaacactttgggagaccaaggtgggcagatcacctgaggtcaagagttcgagaccagcctgcccaacgtgttgaaaccgtgtctctcctaaaaataccaaaattagctcagcatggtgacttatgcctgtaatcccagttacttgggaggctgaggcggaaggatctcttgaatcttggaggcggaagttgcagtgagattgcaccactgcactccagcctgggtgatagagtgagactccgtctccaaaaaaaaaaaaaattatattggtagtgacaggaaaagttagatgtaattgagcactggatttgctcagtaaactttaggccatatatatatatatatggtctcgctctgtcacccaggctggagtgcagtggcatgatcttggctcactgcaacttctgcctcccaggttcaagcggttctcctgcctcagcttcttgagtagctgggattacaggcacacgccaccacacccagctaacttttgtatttttaatag[132 bp omitted]aggacctcacactgtcacccaggctggagtacagtggtgcaattatggctcactgaagcctcaaattcccaggctcaagggatcctcctgccttggcctcccaaagccggcatgagccaccacacctggctgtgtcatttctttaaaggagtcaccaactgttcaatcctattatagccgaatgggtctcaattcagggaggggaagggagggtgactggctttttattcaaccacagtcagcgccctctgcatgtctgctgcacatccttctgcaatttgcttcttgtgttcaacatgttgctgagatctgtctgtatctgtagacagagcccttgcccaggggtcagaaagctatagcttgtgggtgttgaccacctgttgtgttttctttatcttttgttgtggtggtggtggtaaaataaacaacataaaatttaccaacttccctgttttaaagtgcacaattcagtggcatttaggatacctccaatattatgcaaccatcaccactatctacttcctgagctttttcatgatcccaaatggatactgtatccaagaagaagtcactcccagccaggcaccatggctcatgcctgtaatcccagtactttgggaggccaagatgggagatcacttgagcccactagtttgagaacagcctgagcaacatagggagaccttgtctctagaaaaataaaattagctgggcatggtggtgcacacctatggtctcagctacttgggaggctgagatggaaggatcacttgggcccacgaggtcaaggctgcagtgagccattatcactccaccgcactccagcctgggaggcagcgtgagatcctgtcttaaaaaaaaaaaaaaagtcacttctcagacctccctctccgccagccccttgcacccagcaatctttctgtccctgtggatttgcctattctgaaaggcgatttttgtcaataaacgtgggatggaacagtcattcccattcattcacacaccatccctagcagtctcccgctccacagcactagtggaatagtggtgccaggcatggtgtgtcccgcaacacctgaaacattcattgtctagccctttacagagaaagtttgctgacccctgcttagatcactcatttagagtttagtgattgatccatcctctttggtgtgggctccgacctcttactactgcaaacaatactatgatgaacatctgcccatggttgggaaggcctctctcgggctgcccaggagtggaactgctagaacaaggcaaagctggggccttcggctataatccatgctgaccaaccacttcccaaagtagctggaatcatcacctttcccaccaggcagaaatcagctcccgtgtccgcccttgtcagcacttggagctatccaatggtcgattccgcctgcctccaagggtaactccccctcttccagctgacttggatgctggaattccaagtgagctggcttcaaatgtttcaaaaacacatcatgtcttcttcctgccagttccatgcccctgtgcaaagtggccagggagggtcccttctgcacaggacatggtgctgctgcgtgtccctgcagcacagctgctgcttgggcctacgaaaatccattctcccttcccctgtgacctcatcttgactttcctcacccacactttgccccatatggtttcaatgtgaccgggcccatagcctggctccagggtgcgcacatcaccaggccttcctgtcacctttgcaacagtgatgggctcaggagctgccatctgaccaaggtggcccagtgagcatcacgcacagggcaagaggtgctgtgttttggctgtgatatgggcctgcagtaggacccatgctgagtgcctcacggagagaacctgtctaagagtgaagccaacagagttcagcagagtgatagagagatgctctggacttcacttgtgcccctggatcaagctatgcctagagcccatatggacttcagctacataaggccatagactgcctttaaaaaaaaaaaatgtgaccaggcacggtgactcacgcctgtaatcccagcactttggggggccgagacgggtggatcagctgaggtcaggagttcaaaaccaacctggccaacatggtgaaaccccatctctactaaaaatacaaaaattagctgggcatggtggcgggtgcttgtaatcccacttacttggaaggctgaggcaggagacttgcttgaacccgggaggcagaggttgcagtgagtcaagaccatgccactgcactccagcctgggcaacaagagtgaaactccattgctgctgtttttcacaatagcaaagacttggaaccaacccaaatgtccatcaatgatagactggattaagaaagtgtggcacatatacaccatggaatactatgcagccataaaaaaggatgaattcatgtcctttgtagggacatggatgaagctggaaaccatcactcagcaaactatcgcaaggacagaaaaccaaacactgcatgttgtcactcataggtgggaaatgaacaatgagaacacttggacacaggaaggggaacatcacacactggggcctgtcgtggggtggggggagggacagcattaggagatatacctaatgtaaatgacgagttaatgggtgcagcacaccaacatggcacatgtatacatatgtaacaaacctgcatgttgtacacatgtaccatagaacttaaagtataaattaaaaaaataaaaaataaaaataaaaataaagaaactccatctcagagtgaaaaaaatgtggtaaaatacacacagtataaaatttaccatcttttttttttttttttgagatgctgagtcttgctctgttgcccaggctggagtgcagtggtgagatctcggctcactgcaacctccatctcctgggttcaagcaattctcctgcctcagcctcccgagtagctgggactataggtgtacatcgctatgcccggctaacttttatattttcagcagagacggggtttcaccatgttggccaggctggtctcaaactcctgacctcaggtgatctgcccacctcggcctcccaaagtgctggattacaggcctgagccaccgcgcccagcctaaaatttaccattttaaccccaattcagtggcattaagtagtcacaattggttgttgtgcaaccaatctccagaattttttcatcttgcaaaattaaaatcgtgtaccctaggtcagggacaatggctcacacctgcaatcccagcactttaggaggccaaggtgggtggatcacttgagctcaagagttccagactagcttgggcaacgtggtgaaaccccgtctccacaaaaaatataaaaatcattttaaaaaatgtgtacccactaaactacttcctattctccccactcctcccagtccctgactacagccattctactgtctgtctccattattttgactattctgggtacctcacagacgtggaatcagacagtaattgtccttctgtgactggcttattttcacttttcacttagcataatgtcctcaagatacatctacattgtgtgttttttgttttgtcttgttttgttttttgttttgagacacagtttcctcttgttgctcaggctagagtgcagtggcacgatcttggctcaccacaacctccacctcccaggttcgagtgattctcccgcctcagcctcctgagcagctgaggttacagggatgtgccaccacccctggctaattttgtatttttagtagagacagagtttctccatgttggtcaggttggcctcaaactcccgacctcaggtgatccgcccgcctcggcctccctaagtgctgggatgaagactgaatcatgtcccaccgcatggatgggccacatgttgattttccattcattcgatgatgggcactaggttgctcctacctctgggctattgtgaacgatgctatgaacacgggtatataaattgccttttttgttttggtttatttggttgagacagggtcttgcccccaggctggagtgaccgtggttcactgcatcttccacctcccaggctcaagcaatcttctcacctcagcctactgagtagctgggagcgtacgtgcattcccacgcctggctaatgtgttttgttttatagagatgggttctcactaggtttcccaggctggtctcaaactcctgggctcaagagatcctcccatcttggcctcccaaagtgctgggcttacaggtctgagccactgtgccaggcctcaaatggccttttccggcctgagccaggaggaacgggttttggttcttgcaaagagtcatgcccgattcagcccctgagtcgactgggccagaggactttgcggtgttggagggagcggtggctccaggccacgaggtgactggctgagcagatcacgtgctctcactgaaccccagacccagagagaggaaaacagcaagtaagccagggaaagcgaaggggatggtcgtgcctgaggccggtctgtcttctctcccagccctgcctgtgagtggctgccagggccacactatggccagagccagtctggatgccagcacctcggggaattctgcatcatgtgggcgtgtcctgcagggggtgcaaaagacccgccctccttagagctggggtgcagcctgtgatccaggtcctgcgcactgcagcccctctgaggctcctgtgtggagccgggtgtcacagggtgtcacaggcagtcgccttgtgatttggggccgcagagtcccaccccgagcagcacggctgagggtctttccagtggccccagtggtcttcgttcctggctgatcctacaagccaatatcccccaccaatgtatccctcccagccttctcctcaccccacgggagggaagaagcatggccccctctgagaagctgatgcaagttatgagcaatttctgcaggaaaatacaacgtcagaaagttcacagaccccctggaggccattcccggcctccctggggtccaagggaaaaggaggactgatccagacagagggagcctaaatcacccagatctggatccctagctgggccctgaaccagagcgggagaggctacaaagaatgtcaaggagaaacgcaggcaacagtgtagcatcaaggttggtgcagtgggtgagagtgtagcatcaaggttggtgcggtgggtgagagtgtagcatcaaggttggtgcggtgggtgagagtgtagcatcaaggttggtgcggtgggtgagagtgtagcatcaaggttggtgcggtgggtgagagtgtagcatcaaggttggtgcggtgggtgagagtgtagcatcaaggtcaacacagggggtagcgtgttgcatccctactgtggttctgcaggaggttttccttgtggcaggagatacctgctgtgcatcaggcgaagatgtacaatgcctgcaacacagtctcagaatggccgggctcacgcctgtaatcccaacactttgcgaggccgaggccagcagatcgcctgaggtcaggagttggagaccagcctggtcaacatggtgaaaccccatctctattaaaaatgcaaaattagctgggcatgctggctcacgcctgtaatctcagctacccagaagctgaggcaggagaatcgcttgaacccaggaggtggaggttgcagtgagccgaaatcatgccattgcactccagcctgggcaaaaagtgaaactctgtttcaaaaaaaaaaaaaaggctcaggaatggaaaggcaggggtggggtggtaagaaaggaagggagagatggagggaaaaaaacaggaggagaaaggataggaaaaaatgtgtttatgtctatacctgggaagagatcgcaagggagggacagagagaaggaacacaaatctatcaaaaagttaaaagctgatgattctatactgtatgattccctttatgtgaagtgtacaaaacagcaaatccacagacagaaggcagagagggcttcgtggggtgggggggaggggggggtgcatggttgggggtgatggctaagcggttgcagggtttcgttgggggatgatgaaaatgttctacaaccaatgtggtcataaatgcccgaccccgtgaatagactaaaaagcactgaagtgtgcactttgggtgaattgtagggtaggtgaattacatctcaaaaagctgtctaaaaaacaaaaacaaaaaagaaaaagcactggcgaatcttagtgaaagtcatatgggtagtcacatgctattgcttcaacttttctgtaaatctgaagctttcccaaaataaaaagttggaggaggaaggagacagaatccaggtccagggctgatttgacccactccccatttcaaccaaagaggggctcccgaacctcagatctccgccgtcacgtgtcccactagctagtcctcccgcatggctctcgtggacccctgaacccacgcggaatcctatcctttcagcctggccagcggccccgtcaggacagccgcgtcagaagtctcggaggctgccggtatctcatttcctcgtcagtctccctttccttccacacggtcccctggagtctgccgggaaccatgctcacacccttccactccaacccagccagaccctgacaaccaccccatgaagcggcaccagtggtcctgttttaggaaatcagggaagcaagcttcagggacgtgcctggagtcaccagtcacaggcagagctgggaggcaagcccaggactttagaagacatgctggggacccagggatcctgtgtggccatcacacacctgctagaagcaacaccccttccctagaaaaatgaacctggccagacacagtttcaggggctcctggaccccatatgaaggctcctggggtacgatgagtctcagaggacagggagaccagtccctggcaacccctgcatgcccctactcccccccaagtaaacgcatcccctcccagaaagacctgcggcagggttccagcaatcctacctaacgcactcctgggtgagtccctccacccacccaccccgccccggcattccaatcccctcagttactcagggggattgacagtcccagttggtaggggtttgagttctcatcctgtgcgtgtgctgggctccaagcaatcctggaggcaggcccctacacccccatttcacaggtgaggaaactgaggcacaaagaaagacaatcctaggaagcagggtcagcctcggtgcccaggccgcctctaaagctctcagcctggagaccacgggtgaggaggtgtcccccaccccacacacagcacaccagagcccacctcggcgggcgatctccgccttcagcagcccctccatggcgtccgactcggccaggtccaggggcaggtccccgtcactgttgacggcggcgatgttggccccgtggctcaggaggtacctgggggtgggggctggtcagggctgagggtccaggcccccaccccgaccaggtcctgcccggccctcccttgcctcacctggcgatatctaggtagccacaggaggcggccacgtgcagtggcgtccagccctcgttgtctgcctggttcacagtggcgccctgctccaccaagaagcgcaccacctccaggttctcatcaatgcaggcctgggggtgggaaacagccgtcagccgcacctaccccagccacggtgtcccagcaagtcgggactccagagggagccacgaaaacagatccagggacacggtgctaggacagtggggaaaatgacccaacagcctctggccactggctgtttaagatacgcctggttgcccagtggtcaggccggccaggccttcagtgctcagtggaaaccacgaaaggactcctggctatctgcaaacaggaagtgaacggggaagggagggggcttctcatctgggtgcgggaaccccacatggtacctgttagacacggcaaaacccccgtcaccacccacaggtggcgcttccagtgctcagactagggaagaggttccagcccctcctccttcagagccaggagtcctggcccccagcccctcctgccttaaacccagccaggtccttccaagggtcaagctcggaaaccaccccagcagatactctgcaggaacgaagccgtgggcccagggctatgcagggtggaggaaggccaccctgtgctgggacagactcaggggcctgggcgggactcccagaggggtgagacagctgcacacctgtgtgcctgggccccaggctgtcacactccagttcactgaggccccctctgcacggggccctgcagccaggggctgacacgggccaccgtttctcattcttcccttaggggtccaaaacttggggggacaaaagccgaagtccagggggtcggaggagggacttgccccaggccttgtggacactgggtgggctccgggacctgaactggagctgaggaaggagtgaagctaaactcctagatccacgggataaattaccccccaagtccctcacctctccaaagctgcccatctggaggaggcgggagggagctacgagggccaagagcatgaggtcatggaaactcgggctgtgaaggggccgcacgtgccctgggaacgggatgaactcggctcgtttatttccacccagttgtcatggcgataggggaggggggcaaggagagcaatgggcctttccctttcaaggacctgcccagtacaggcatccctgtgaaagatgcctgaggcctgggcaccagggactccagagtccaggcccaacccctccccattcaacccaggaggccaggccccagcccttccgccctcagatgaaggagtccaggcccccagcctctccccattcagacccaggggtccaggcccagccccgcctccctaagacccagaagtccaggcccccagcccctcctccctcagacccacgagtccaggccccagcccctcctccctcggacccaggagtccaggcccccagtccctccaccctcagacccaggagtccaggccccagcccctcctccctcggacccaggagtccaggccccagcccctcctctctcaaacccaggagcccaggcccccagctcttctctgttcagccctaagaatcctggctccagcccctcctactctagcccccaaccccctagccactaaggcaattggggtgcaggaatgggggcagggtaccagcctcaccaagtggttgataaacccacgtggggtaccctaagaacttgggaacagccacagcaggggggcgatgcttggggacctgcctggagaaggatgcaggacgagaaacacagccccaggtggagaaactggccgggaatcaagagtcacccagagacagtgaccaaccatccctgttttcctaggactgagggtttcagtgctaaaactaggctgtcctgggcaaacagcataagctggtcaccccacacccagacctgacccaaacccagctcccctgcttcttggccacgtaacctgagaagggaatccctcctctctgaaccccagcccaccccaatgctccaggcctcctgggataccccgaagagtgagtttgccaagcagtcaccccacagttggaggagaatccacccaaaaggcagcctggtagacagggctggggtggcctctcgtggggtccaggccaagtaggtggcctggggcctctgggggatgcaggggaagggggatgcaggggaacggggatgcaggggaacggggctcagtctgaagagcagagccaggaacccctgtagggaaggggcaggagagccaggggcatgagatggtggacgaggaagggggacagggaagcctgagcgcctctcctgggcttgccaaggactcaaacccagaagcccagagcagggccttagggaagcgggaccctgctctgggcggaggaatatgtcccagatagcactggggactctttaaggaaagaaggatggagaaagagaaagggagtagaggcggccacgacctggtgaacacctaggacgcaccattctcacaaagggagttttccacacggacacccccctcctcaccacagccctgccaggacggggctggctactggccttatctcacaggtaaaactgacgcacggaggaacaatataaattggggactagaaaggtgaagagccaaagttagaactcaggaccaacttattctgattttgtttttccaaactgcttctcctcttgggaagtgtaaggaagctgcagcaccaggatcagtgaaacgcaccagacggccgcgtcagagcagctcaggttctgggagagggtagcgcagggtggccactgagaaccgggcaggtcacgcatcccccccttccctcccaccccctgccaagctctccctcccaggatcctctctggctccatcgtaagcaaaccttagaggttctggcaaggagagagatggctccaggaaatgggggtgtgtcaccagataaggaatctgcctaacaggaggtgggggttagacccaatatcaggagactaggaaggaggaggcctaaggatggggcttttctgtcaccaatcctgtccctagtggccccactgtggggtggaggggacagataaaagtacccagaaccagagccacattaaccggccctgggaatataaggtggtcccagctcggggacacaggatccctggaggcagcaaacatgctgtcctgaagtggacataggggcccgggttggaggaagaagactagctgagctctcggacccctggaagatgccatgacagggggctggaagagctagcacagactagagaggtaaggggggtaggggagctgcccaaatgaaaggagtgagaggtgacccgaatccacaggagaacggggtgtccaggcaaagaaagcaagaggatggagaggtggctaaagccagggagacggggtactttggggttgtccagaaaaacggtgatgatgcaggcctacaagaaggggaggcgggacgcaagggagacatccgtcggagaaggccatcctaagaaacgagagatggcacaggccccagaaggagaaggaaaagggaacccagcgagtgaagacggcatggggttgggtgagggaggagagatgcccggagaggacccagacacggggaggatccgctcagaggacatcacgtggtgcagcgccgagaaggaagtgctccggaaagagcatccttgggcagcaacacagcagagagcaaggggaagagggagtggaggaagacggaacctgaaggaggcggcagggaaggatctgggccagccgtagaggtgacccaggccacaagctgcagacagaaagcggcacaggcccaggggagagaatgcaggtcagagaaagcaggacctgcctgggaaggggaaacagtgggccagaggcggcgcagaagccagtagagctcaaagtggtccggactcaggagagagacggcagcgttagagggcagagttccggcggcacagcaagggcactcgggggcgagaggagggcagcgcaaagtgacaatggccagggccaggcagatagaccagactgagctatgggagctggctcaggttcaggagagggcagggcagggaaggagacaaagtccaggaccggctggaggggctcaacatcggaagaggggaagtcgagggagggatggtaaggaggactgcatgggtcagcacaggctgccaaagccagggccagttaaagcgactccaatgcggaagagagtaggtcgaaggggaatggtaaggaggcctggggcagagtggtcagcacagagtggctaagcccagggccagttgaagcggctccaattcggaagtggggtggtcgaaggggaatggtaagggggactgggacggggtgtcagcatagggtggcaaagcccagggccaggaacgacggggcggatcgagactggcaacggggaaggaggatgccccaggtggcgcagcagagggtggacctggccccgggagacgccgggcggggggcgctgacctggtgcagggcgctgataccgtcggcgttggtggagtccagcacggcgcgggcgggcggcggcgcggcggggtcgagctcggcgccggggccagggtcggcggcgcgcagcatcagacgcgcctcgtccaggtcgccgcccgcacaggccgccaggaactcggcggcgcgctcgaagcggacggtgcgggcgcggcgctctccggggccaggctcggcgcccgcccgcgccccccactgccgcagctgctcccgtcgccgctcccgggcagccgccgccgccgcccccgggccagccgccgggccatcctctccggacatcgcaccgcccgcccgcccagcgagcgagcgagcgccgagccccaaccgccgccaccacccgcccgcccgcccgccccgggggccgccgggaactgccgctggccccccaccgccccaaggatctcccggtccccgcccggcgtgctgacgtcacggcgctgccccagggtgtgctgggcaggtcgcggggagcgctgggaaatggagtccattagcagaagtggcccttggccacttccaggagtcgctgtgccccgatgcacactgggaagtccgcagctccgaggcgcccagtggaaatcgccagatgagggcctcctccggggaatgctgggaaatggagtctacaggccggaggggtgccccacggcatactaggaagtgtgtagcaccgggtaaaggggatgaatagcagactgccccggggcagttaggaattcgactggacagccgcgtgggagggagtgcggggagaggcagagttgttttgttattgttgttttattttgttttctttgttttgagacggagtctcgctctgtcgccacgctggagttcagtggcgcgatatcggctcgctgcaacctccgcttcccaggttcaagcaattctggctcagtccccagagtagctgggataacaggcgcgcgccaccccgccctgctaatttttatatttttagtagagacgggatttcaccatgttggccatgatggtcttgatctcttgacctcatgatccgcccgcctcggcctgtaatcctgctgggatgacgagcgtaagccaccatgcccagctgggttttatttattttggtttttttcctgaccccttaactagaaataagctccacgagagcgggatcttttgtcttctgtgcactacttgtcctcggttcttagaacagaacctgagagaacctgatcgcaaatatttttggaatgaatgaatgaatgggttcaccagggcaccatgggaaactgagtccgcaacctagaagccatgaaagacagtccacttccaagcttccctgggtgacctcgcagggcatgctgggaaatgaaatttgcggtgaaaaggtcaggaccacgatcctagggcacgctgggaaatgtagcccacagggccacacccctaaaagcacagtggggtgcaaggcagggccccaaggcatttagggctcggggcaagagaaatccacactccactccctaatggtaatccctgagccacaccgagtaaaggaacccaagacacagtgtccacagggacagggctctcagagctttcactggcccgcgcttctcctgcgcccacccggacctcctgggaaccgcccaggccctcgcgcgctctcaaggcatgctgggattggtggtcccgggcaaggagttccagcaggtggggggcgaatcacctttcagcgggcccaagcgatgagcacaccttgatcttcaccttacggatcccgcgcccaactcaagattgggaaggtggctggcactttgtgacaggaagagtcccataaaaatcatacagaaaagggccaaaatcgggacagagactacagactgtttcccaagcgctgtgggagtttcccacccactctgaagtccttgggtttgcgcggagacgtaaactgcgcatcccacgaggcctgtttctttccctctctctttctcttttgttgttgttgttgctgctgctgttacgaaaatttttgtggttttattgtatcatgaggcattgaaacatccggcgactcaatgtctaggcggtgaggcagccgctttctccttcactttctttgggttaagtagagcaacttgtc[169 bp omitted]ccaccacgcccggctaatttttgttttttagtagagacggggtttcaccatgttggccaggctggtctcgaattcctgacctcgtgatccgactgcctcggcctcccaaaatgctgggattacaggcgtgagccgccgcgaccggccagattttttttttttttaaaggacaaccttttgcattacttaagtctttccaaggcatgcgctggtacaacacaaacttttcccattacatgcagctagtctagtgtccagacgtcatgcacaacacctccgtggcatcagcgcactgcgcccactcccactgcgaccctgctcatttgtgcatcatatctggaggagtggcaatagttctggaaagaggagggaagaggaggcagcgtgagggcccggtggagaggaggtcagctgaagttgtgcagagcaagcctgcatatcattggtgcaaacccaagcatcattgcatcgctgatgttttgttttgtttggttttgttttgtttttgagacggagtctcactgtgtcgcccaggctggagtgcagtgatgtgatctcggctcactgcaacctccgcctcccaggttcaagtgattctcctacctcagcctcccaagtagctgggattacaggcgtgctccacgcctggctaatttttgtatttttagtagagacaaggtttcaccatgttggccaggctggtctcgatctcctgacctcaagtgatccacccgcctcagcttcccaaagtgctgggattacaggcatgagccaccacacccagctgatgttctttagtaggaatatctggtggaaccccaagatggggtcttcatccgccacgaagcctgtttctatagaaagggatagttctggtggctcttaggtgtggtccctgaaccccacactttccacatacttacacaccaacctccttcccccaggaaaacaagaagtcggtcttcagggtgttaccgtgtagctctggttctgtatgtattctgtgcctttatgtataattgtgtgtatttgcaatcatgtctgtggctggatgtatgttgtttatgagtttgtgtttatggtttgtttttgtttgtttgtttgtttgttttgagatggagtttcactcttgtcatcgcccaggctggattgcactggcgcaatcaaaaaagagtaaaataacagaaatcagaatgggcttataatactcttacccctctccacacaggacagaagagtcaattttatacttttgtggatgttctaacttcacctgcttatctgaaccatctttatggtgcagactaatatctatttttctgctgttacagaagaagtgggaacattttcttcttatctttctgaggttatttacaccagtgaggagggcctgcagttccaaggttaagcaccaacattccactgttaccattgagagcaaagagcagaccctagaagtgaaaacaaaacctttaccacaggaagacaagagcaaaagatgatgttcttgagtggcatatgaagatgctcacagccaacatcacatgcctatcagatattttatgtacatcatctcatcaactccaggaggcagagactaagagactagccccagtcacagagctagaaattggccaagacaaggttcaatctgaggactgtcaaatccagaactggaatttcttttttttttttttttttttgagatggagtctcgctctgtcacccaggctggagtgcagcggcatgatctcagctcactgcaacctccacctcttgggttc[131 bp omitted]gcctcccaaagtgctgggattacaggcatgagccactgcacctggccttagaagcctcagttcctgatggcagttgggatctgcctttccttccctggactgcctacctcttgtcttttaggttacatatgagaaaacaaacctccaattcaccaaaactattgttatttggggagctgtctcttactatcagccaaacataactcctcaatgacactgttagtttagcactgccattataatcaggagggatctgggtccagctgcgggaacatgaagaggcactagtgggatgaccacagccagcccctgttgattcaccaggagactgcagatgcatgagcaagtccagccaagatcagccagacaagaactcccagcggagcccagcccaatttgccaactctcaaactataatttttttttttttttttgagacggagtctcgctctgtctcccaggctggagtgcagtggcgcgatctcccctcactgcaagttccacctcctgggttcacgccattctcctgcctcagcctcccgagtagctgggactacagacgcctgccaccacacctggctaatttttttgtatttttagtagagatggggtttcactgtgttagccaggatggtctcaatctcctgacctcatgatccgcccgccttggcctcccaaagtgctgggattacaggcatgagccaccgcgcccagccctcaaaccataagttaaatagatgactgttgactcaagccactaatatttggggtaacttttttcttttttctttgctttttttttttgagaccaagtcccactctgtcatccaggctggaatgcagtggcatgacctcggctcactgcaacctccacctctgagggtcaagtgattctcctgcctcagcctcctaagtaactggaattacaggcaccagccaccatgcctggctactttttgtgtgttttcagtagagatggggtttcactatgctgaccaggctggtcttgaactcctggcctcaagtgatccacccgcctcagcctcccaaagtgctgggattacaggcaggggtgagccactgcgcccacctggggtaactttttatgccacaaaagcaaactgatgcaaggcattccaagaggcctttgagcctcttgcaagtcaagctgattgcaagacactctgcctttgataaaatgtagtggacagagaagcagtggtttcagtggcagagatgacaaattgttgcccaatattcgttgtccccttctttctcaacaaaatggaacctctgattatgctgggtttagcatagccatctagaataatggttacatatcccagtgtcgggcctccgagcccaagctaagccatcatatcccctgtgggcctgcacatatacatgaagatggcctgaagcaactgaagatccaaaaaagaagcgaaaatagtcttacctgatgacattctaccattgtgatttgttcccgccccaccctaactgatacgatatattctgcctggtccttaagaaggtactttgtaatattctcccccgcctttaagaaggtactttgtaatattctccctgcccttgagaatgtactttgtacgcccatcccaaacctataagaactaatgataatcccacctttgctgactctgttttcggactcagcccacctgcacccaggtgaaataaatagcctttttgctcacacaaagcctgtttggtggtctcttcacacggacgtgcgtgacatttggtgccgtgactaggatcaggggacctcccttgggagataaatcccctgtcctcctgctctttgcaccgtgagaaggatccacctatgacctcgggtcctcagaccaaccagtccaaggaatatttcaccaattttaaattgggtaagcagtctctttttactctcttctacaacctctctcactatccctcaacctctttctcctttgaatcttggcgccacccttcagtctctcccttctcttaatttcagttcctttccttttctggtagagacagaggagacgtgttttatacgtgaacccaaaaccccagcgctggtcacggactcgggaagacagtcttcccttggtgtttaatcactgcggggacgcctgcttgattattcacccacgtttcagaggtgtctgatcaccacggggacgcttgccttgatccttcacccttagtggcaagcaccactttcctggggggcaagcaccccccaccccttctctccatgtctctactctctcttttctctgggcttgcctccttcactataggcaaccttccaccgtccgaccctccttctcccttagcctgtgttctcaagaacttaaaacctcttcaactcacacctgacctaaaacctaaacaccttattttcttctgcaatgctgcttaaccccaatacaaactcgacaatggttctaaatagccagaaaacggcaattttgatttttccatcctacaagatctagataattcttgtcgtaaaatgggccaaaggtctgaggtacctgatatccaggcattcttttacacattggtccctccctagtctctgttcctaatgcgacttgtcccaaatcctccttctttccctcctgcctgtcccctcagtctcaaccccaagcgtcactgagtcttttcaatcttccttttctaccgacccatctgacctctcccctcttccccaggctgctcctcctcaggtcgctccccaccaggctgaatcaggctccaattcttcctcagcctcctctcccccgccctataatccttccatcacctcctctccccacacccgatccagcttacagttttcttctgcagctagccctcccccacctgcccagcaatttcctctgaaagaggtggctggagccaaaggcatagtcaaggttaatgctccttttcctttatccgacctctcccagatcagttagtgtttaggctctttttcatcaaatataaaaaccccgcccagttcatggctcgtttggcagcacccctgaggccctttacagccctagaccctgaagggtcagaaggcctcttattctcaatatgcattttattacccaatctgctcctgacattaaataaagctccaaaacccccacaacaggacttaattaacctcgccttcaaggtgtacattaatagagtagaggcagctgcatagcaacatatttctgagttgcaattccttgcctccattgtgagagaaaccccagccacatctccagcacacaagaacttcaaaatgcctacgccgcagtggtctagcattcctacaggacctcctccatcaggatcttgcttcaagtgccagaaatctggccactgggccaaggaatgcctgcagcccgggattcctcctaagctgtgtcccatctgtgcaggaccccactggaaattggactgtccaacttgtccggcagccactcccaaagcccctggaactccggcccaaggccctctgactgactccttcccagatcttcttggcttagcggctgaagactgacactgccccatcacctcggaagcctcctggaccatcacagatgctctgggcaactcttacagtggagggcaagtctgtccccttcttaatcaatacggaggctacccactccacattaccttcttttcaagggcctgtttcccttgcctccataactgttgtgggtattgacggccaggcttctaaacctcttaaaaccccccaactctggtgccaacttggacaacactcttttatgcacttctttttagttatccccacctgcccagttcccttattaggtcaagacattataaccaaattatctgcttccctgatcattcctgggctacagccacacctcattgccacccttttccccagttcaaagcctccttcacatcctccccttgtatctccccaccttaatccgcaagtatgggatacctctactccctccttggtgaccgatcatgcaccccttaccatcccattaaaacctaatcacccttaccccactca[185 bp omitted]gtggcgggcgcctgtagccccagctactcgggaggctgaggcaggagaatggcgtgaacctgggaggcagagcttgcagtgagccaagatcgtgccactgcactccagcctgggcgacagagcaagactccatctcaaaaaaaaaaaaaaaaaaaaaaggttaaagcctgttatcacccacctgttacaacatggtctcttgaagcctacaaattctccttacaactcccctatcctacccatccaaaaccagacaagtcttacaggttagttcaggatctgtgccttatcaaccacattgtcttgcctatccaccccatggtgccaaacccgtatactctcctatcctcaatacctccctccacaacccattattctgttctagataaacctagctgaccccataaatcctaaatcctttccccact[132 bp omitted]aaccccatctctactaaaaatacaaaaaattagccgggggtggtggcgggtgcctgtagtcccagctactcaggaggctaaggcaggagaatgacatgaacctgggaagcggagcttgcagtgagccgagatcgcgccactgcactccagcctgggcaacagagtgagagactctgtctcaaaaaaaaacaaaacgaaacaaaaaaacaaaaaaaaacagccctaaaagctgctcccacactagctgtccctaactcatcccaacccttttcatcacacgcagctgaagtacagggctgtgctctcagaattcttacacaagagccaggaccgcgccctatagcctttctgtccaaacaacttgaccttactgttttagcctagccctcatgcctgtgtgtggtggctgccgctgctttaatacttttagaggccctcaaaatcacaaactatgctcaactcactctctacagttctcataactttcaaaatctattttcttcctcatacctgatgcatatactttctgctccccggctccttcagctgtactcactctttgttgagtctcccacaatcaccattgttcctggcccggacttcaatccggcctcccacattattctggataccacacctgaccctcatgactatctctctgatccacctgacattcaccccatttccccatatttccttctttcctgttcctcagcctgatcacacttggtttattgatggcagttccaccaggcctaatcgccacacaccagcaaaggcaggctatgctatagtatcttccacatctatcattgaggatactgctttgcctccctccactacctctcagcaagctgaactcattgccttaactcaggccctcactcttgcaaaaggactacgcgtcaatatttatactgactctaaatatgcctttcatattctgccccaccatgcagttatataggctgaaggaggtttcctcactacgcaggtgtcctccatctttaatgcctccttaataaaaactcttctcaaggccacttctcttccaaaggaagctggagtcattcactgcaagggccatcaaaaggcatcagatcccattgctcaggacaacgcttatgctgataaggtagctaaagaagcagctagctttccaacttctgcccctcacggccagtttttctccttcacatcggtcactcccacctactcccccactgaaactgccacctatcaatctcttcccacacaaggcaaatagtttttagaccaaggaaaatatctccttccagcctcacaggcccattctattctgtcgtcacttcatagcctcttccatgtaggttacaagccgctagcccatctcttagaacctctcatttcctttccttcgtggacatctatcctcaaggaaaccacttctcagtgttccatctgctattctactacccctcagggattgctcaggtcccctcccttccctacacatcaggctcggggatttgcccccgcccaggactggcaaattgacttcactcacatgccctgagtcaggaaactaaaatacctcttggtctgggtagacactttcactggatgggtagaggcctttcccacagggtctgagaaggtcaccacagtcatttcttcccttctgtcagacataattccacggtttggccttcccacctctatacagtctgataacggaccagcctttattagtcaaatcacccaagcagtctctcaggctctcggtatttagtggctcctggttttacctcaaatcgccttaagtctctcttgaagtggatagatcttcagtggcaaggtaccctccaatactttcaccctgatgaagtcctattctttacttctatgctcactgttattctggttcccattctttttttttttttgagacagagtcttgctctgttgcccaggctggagtgcagtggcgcgatctcggctcactgcaagctccgactcctgggttcacaccattctcctgcctcagcctccggagcagctgggaccacaggcgcccgccaccacacccagctaattttttgtatttttagtagagatggggtttcactgtgttagccaggatggtctcaatctcctgacctcgtgatccgcccgcctcagcctcccaaagtgctgggattacaggggtgagccaccacgcccggccttggttcccattcttatgccatcctctacctctccccagctatctccaccacactatcaatctcactctctcccagccatttctaatcctcctttaacaaacaattactggctttgcatttctctttcctccaaaattgccaaggcctcgacttactcactgctaaaaaaaaaaaggactctgtatatttttaaatgaagagtgttgtttttacctaaatcaatctggcctggtatatgacaacacaaaaaaactcaaagatagagccccaaaactcaccagccaagcaagtaattatgctgaacccccttggacactctctaattggatgtcctgggtcctccgaattcttagtcctttaatacctgcttttctccttctcttatttggaccttgtgtcttctgtttagtttctcaatttatacaaaaccgcatccaggccatcaccagtaattctagaaggacaaatgctccttctaacaacccccagtatcaccccttaccccaaaatctttcttcagtttaatctctcccactctaggttcccacgctgccccaatcccactcgaagcagccctgagaaacatcgtccgttatctctccataccacccccaaaaattttcaccgcccgaacacttcaccactattttgttttgtttttcttattaatataagacaggaatatcaggcctctgagcctaagctaagccatcatatcccctgtgacctgcacgtacacatccagatggcctgaagcaaccgaagatccacaaaagaagtgaaaatagccttaactgatgacattccaccactgtgatttgttcctgccccactaactgataccatatattctgccccacccttaagaaggtactttgtaatattctccccgcccttgaatgtactttgtacgcccatctcaaacctgtaagaactaatgataatcccaccatcctttgctgactcccttttcagactcagcccacctgcacccaggtgaaataaacagccttgttgctcacacaaagcctgtttggtggtctcttcccacagacgcacgggacaccagcatccctaccaactgggtatgataatgtaattaacttctgtcaatgagactgagtaggagtaaacatgtctccttccattttaccccagtctgcggtctgaaacagagtgggaactatcttaccctatgggcaaaggcaaccccctggggaaaggagctacacagtaggatgagcttggacccaggcaatgttacaaaacagagccatcatcccaactcagacttttacatgtgaaagaaatcaactattgtcagccaggcaaagtggctcacacctgcaatcccagcattttgaaaggctgaagcgggaagactgcttgagcccaggaggttgaggccgcagtgagctgtgattgcaccactgcactctag[225 bp omitted]ggaggctgaggcaggagaatcgcttgaaccagggagtgggagcttgcagtgagctgagattgcgccactgcactccaacctggtgacagagcgagactccatctcaaaaaaaaaaaaaaagaaaaagaaaaagaaattaaaacaaaaaaagaaagaaagaaaaagaaaatcaactgttgtgttggtccatttgggctgctgtaacagaacaccgtagacctggtcatttacaaacaatacaaatgtattgctcacaggtctgtaggctggaaagaccaggatcagggcgccagaagactcagtgtggagggagggcctgctctctgcttcacagatggtgccttcttgctgtgtcctcacacagccaaaggggcaaggggctctccctcaagcctcttttataaggacattaaccccatttgtgagggctctgccttcatgacctagtcacctcctaaagtcccgtggaatactattgcattcatgatcaggtttcaacatgtaaattttgaggggatacatacattcaaagcatagcaactgtctggttatttgggatttagggcccagtggccagacccacatggtcactaataagacatcccaaatggaaagtcggaaaggcagaacagcaaacaatacttattgtcactgaactgactctcccatacgaaactttacgtgtcactttttaaatttacttttgcattgtgtgtgtgt[136 bp omitted]tcagcctcctgagtagctgggattacagccaccactatgcccagctaatctttttttctttttttttgtaatttagtagagatagggtttcctcgagttggccaggctggtcacaaactcctgacctcaagagatcctcctgcctccagcttgcagtgagccgagatcacgccactgcactccagcctgggtgacagaacgaaactctgtctaaaagaaaaaaaaaagagatcctcccgcctctgcctcccaaagttctgggattacaagcaggagtcacctcgcttggcctgcttttgaatttcttaatttggatatgcttaacatatcataagatgtaccaactaaagtacaattcagagtttttcagtatattcacgttgtgcaaccatcaccactatctaattccagaacatgttcatcatcgaaaaagaaacgccattctcttagccgtcatctctacccaccgtcccctagcccctcaaaaacacgaacctccttcctacttctgtggatttgcctattctagaaaattcatataagtggaatcatatgtgacctttgatgtctggttcctttcgcttagtatgttttcaaggttcgtgcgtgtcacaccacatgtcagcacttcattcctttccgtggctagacaacattccactgtgtggatgaaccaacgtatgtttatccgttcatcagttaatgagcatttgagttgcttctgccttttggctattatgaaaaactagcggtgggccaggcgcggtggctcacggctgtaatcccagcactttgggaggctgaggcaggcggatcacctgaggtcaggagttcgagaccagcctggccaacatggtaaaatcccgtctctactaaaaacacgaaaattagctggcgtggtggcaggcgcctgtagtcccagctactcgggaggctgaggcagaattgcttgaacccgggaggtggagg[138 bp omitted]ggcgggaggatcagctgaggtcaggagtctgagaccagcctgaccaatatggtgaaaccctgtctctactaaaaatacaaaaattagccaggcatgttggtgggcacctgtagtcccagctgcttgggaggctgagacaggaaaattgcttgaacccgggaggtggaggttgcggtgagccgagatcatgccactgcactccaggctgggtgacagagcaagactccatctcaaaaaaaaaaaaaaaaaaagatgctgcggccggtgcagtgattcacacctaaaatcccaacactttcagaggctgttgtgggaggatcacttgagcccaggaattcaaggctgcagtgagccgtgatcacgccactgcactgcagcctgggcgacagagcaagaccctgtctctaaaaattaaaaataaaaatgctactatgaacattcatgtacaagcttttgtgtggacaaaggttcttggttctcttggatatacatccaggaggggaactgctgggtcctgcagaaatgctttcacttgttgaggaaccgccaggctgcttgcaaagctgttgcattttccattcccaccagcagtgtgtgaaggttcagcctgccgtactttaatgattattggtgacactctttcaagtaacttgttggtaataagaagtcaattaaccaggagagaccagctgcatctcaaccataataacatcagagaacccagcgggtgtctgaggggagcgtttatttcaagctaccgatgggacaaacactcccaggcttcccaggtgccactgtccggggcggcatcctcacttccagcggcctccaacgcggcccttccctgcccccttccggctgtagaagaatgaggtggtatcaggaaaaaggggcccctccagtctctgaaatgggccccaggccctcaattcaggaagcccattccccaaaatattagccctccctgcccagaggaagcagtgagcaaaacaactgtcacctcttttgggttctatgactggggggcagcggctggtggtcaaagcctcgctgacatgtgggagctgatatttgggggcgagtgcagggtgttcatgggggagctgatgaatgtttatgagtcaggggccagggtggggggaggaagggttggatgatctgggcatgggtgggtaacacgcaggaagggctggggtgaaagagacaggaaatgggagaagaggagaagggagagggagaggagggaggaagga[223 bp omitted]gaggcaggagaatcgcttgaacccgggagatggaagttgcagtgagctgagatcactccactgcactccagcctgggtgacagagcgagacgcagtctcaataaaaaaaaaaaaaaagaaagaaaaagaaaaaggaactgagacccaggattccgagagcagagagaggaggacagagaaggaaggacaaagagaaaggggcagaaactcaggcagtgggggatggagcccacagagggagggaaagaggcctgagagtcagcgggagggtagggacaagagcaagggcttgagacggtcacactcacaacttctgggcgtggctgatgcggttgtacagcacgttgatctgcggaggcagaagacagatgctgggacagccggtggggacgtggggacgggccacccacccctgcctggagtttgctggtccctcccagcccagccctgccctctctccctccctccctgcggagctgggtctcacctcatatttctgctgtttcagcttcgccatcaggtcgaacttctcagactccagctggtggatccagtccgacagctcctgggctttctccctggcagggcaggagggctgtgatggaggcagccaggcagaccgggccctaggcccagggacggagaggaacttgggcccagagaggttgtgggaaccacccaaagccacacagcgagactgtgagttcagcgttgtcggcaccattttgttcatatttgaggccgagagttttaaaatctgtgcccactttctccacatccgagctggagctctcgcatttcccaaggggagagaagggtgtcatgattaagagaccaggctcggcacctgtaatcccagcactttgggaggcagaggccagcagaacacttgagcccaggagttcaagaccagcctgggcaacaaagagagaccccgtctctgctaaaaataattaaaaaaattagccaggcagggtgtttccggctacttgggaggctgaggcagaaggaacctgggaggtcaaagctgcagtgagctgtgattgcaccactgtattcctgcctggcaacagagcaagacaaaagaaaggaaagaaaaggagaaaggaaagtggggaggggaggggagaggagaagaggggaggggagaggagaagaggggaggggagaggagaagaggggaggggagaggagggaagaagaaggggagggagggaggggaggggagacgaggggaggggaggggaggggagacgaggggaagggaggggaggggagaggggaaagaaaaggaagaaagaaaagaccgagcccaggctctgcagttagaagcccctggttcaattcccagccatgccattctctggtttatgaatatgtcacatgacttcctttagaatcctgtttccttctctagaaaatatggaaataaaactgtggaagagatggctgcttgcctacctgttagcccttctccctttcttctagaaatagcctcttgtgcattaggctgagttgaaaaactactttgcccaatctcccttgcaggtaggggtggctactcagacgaaagcaggtcactgggtgcggcttccaaaagagactgtgtggctcttctcttgcgtcttctttctgctgcttggatcatccatgtgaggctggagctagcagctatattggactaagtgattttgaggatggaaatattgggctaaaagtagtgagtgaagcagaaaacataggagtctggtctctgattttgtagaattgccataccagccctggactaaaacctacctttccttccttccttccttccttcttttctttcttttcttttttttttgatagggtctcactttgtcacccaggctggagtgcagtgacaccatcacagctcaccgcagtctcaacctctcaggctctagtgatcctctcacctcagcctttttttttttttttttttaagacagagtttcgctcatgtcgcccaggctggagtgcagtggtgccatctcggctcaccgcaacctccgcctcctgggttcagtgattctcctgcctcagcctccagagtagctgggattacaggcgcctgccaccacgcccggctaatttttgtatttttagtagagatgggatttcatcatattggtcaggctggtctcctgacctcaggtgatctgcccgcctcagcctcccaaagtgctgggattacaggtgtgagccgccgcgcccgcccggccaacaatactttacatgaaccatgtgcacaggaaggagggcccacagcgccccccagagggcttccaggagcctgctgtgcacatcctttcccgtctccacactcagtgtccccacacgggtagtttgaaaggagcaaggtggaagtatttacgccctgggaatgggcatgtgctaaatctagacattttgccccctggagagcagctgttaaacatttaccatgaagccactttacagcacactagcaaagagtacggactattgcaccagactgccgggttcaaatcccagctcttccacttgctagctgtgcaaccctggaagggttacttaacctctctgtgcctcaggttcctcactattaacacaaggataataatagtatctacctcacagggttgtaaaccctccacaggaagctgctgctgtaattattatttttttaaggatggggtctcactacattgcccaggctggtctccaactcctggcctcaagcaatcctcccatcttagcctcccaaagtgctggaattacaggcatgagccaccgggcccagcctgtaattattattactatctcactgccctttcacagctctgtgaggtcaattttgtgattatatccttgttctgccaatgaggaatgggagccccagagaagtcagataacgtgcgcaagatcacaaagtagccggcaaagctggcactgagccctgggcaggggctttcggtgcaagcggcaaacccgatcacggcgccactctggggtggttgaagtttctgagccacagcccaggccagagaacatggagaaacaggcgggctcctgaaggcaagcccccaccagcctgccgtcctgtagcttatcatgagaggcaggctgtcttggctatagatgcgagggactcagctggaaaattctcacccgcattcctggcttgaatttaggtaaaaggcacagcccatcctgagctccaaggcacatcacggagttaacaaaatctcctaaacttgggggagggaagtcatcttgtctggcttccttggtaacacctgtcagatgctacaggccacggcagccacgaaaagtgggttcagtgacatgtttcacaaagaaggcagcagaggcccagagaggggaagccacttgcccaaagtcacatagcactggagctgagacccggagtatctgcccacccagatctgggtgtgagctcctttatccccctgtctcacacccaggcccctacaccccgagccccccacagcacctaccggagctgttcctcccccatgtagtcaatgtccagaggcttcttacgctcggagaggatgcgcaccttcatctcccgccccgtctgccgcttaccacgcttctgttctgcctgagggtgggggaggcggaacagtaaactgggggccacatcccacagagcactgccgtgtcgggacccacacgtcggatcccacagaccatttccatgttgggaccacaggtctgcaccccaggcccatctccttcagacctaggagtccagccccactccctcctccctcagattcaggaggagtccagacccccagtcccttctcttagactgagtccaagccccagaccctctcgcattaggaaccagaagtctggcccccagcccctcctccctcagcccaggagtccagaccccagcccctcctccctcagacccaggattgcaggccccgagcccctcctccctcagacccaggagtgcaggcccccagcccctcctccctcagacccaggagtccaggcccccagcccctcctctcagactgagtccaagccccagaccctctcgcattaggaaccagaagtctggcccccagcccctcctccctcagacccaggcgtccaggccctcagcccctcctccctcagcccaggagtccaggaccccagcccctcctccctcagacccaggcgtccagaccccagctcctcctccctcagacccaggagttcagggcccagcccctcctccctcagacccaggaatccaggcctcagcccctcctccgttaggaaccagaggtctggcccccagcccctgccccctcagaactcagacctcaggctcctgcaggctgactcaccttgaccaggtagccgccaaaatgggcccccatgttggacagcaccttctttttcttggcatcatcctctgcccgcttcttggcctcttcctcttccttcctcatcttctcctcctgtgggaagtaaggggttaacctcatggactcccctgtaggactgagggaggagggccctgggatgtggaactggggcacagggatcagcagacccagtgccgcagaggctgctgggacatcagaaccagcagaaacgcaggggtacccactcccggccctgccacgtctccccgtgtgaccacctacaagtcccttcccctctgtttttttttttttttgagacggactctcgctctgttgctcaggctggagtgcagtggtgcgatcttggctcactgcaacctccgcctcccgggtttaagcaattctccagcctcagcctcctgagtagctgggattacaggcacccgccaccgcgcccaactaatttttgtatttttagtggagacgcggtttcaccatgttggccagg[138 bp omitted]agaagaaatgcctgctttttctgcatgtctccaccctgaaatagccgatagtgaactctgctgtacgacctcactccagatgctcagcctgtctgggccacagtcgcccttagtctcaggatatgagaatgtctgttttgagggggtcaagggaagtaactggtgataagaccagggactggggagattaaagaggctgatggccttgagcctgaggaaggggttctggaatattgagcgaaggcattacgacattcgagaaactcttcattgaatgttccagaaacagtggtttgtccaggctgagccccgtctccttatggtggacatgaggctttttgtacacccagcactccgtacctgaattagtttcctttctgtttttgagatggagtctcgctctgtcactcaggctggagtgcagtggtgcaatctctgctctgttcactgcaacccccacctcctgggttcaagtgattctcctgcctcggcctcccaagtaactgggattacagacatgtgccaccattaccagctaatttttgtatttttagtacaaacagggtttcaccatgttggccaggctggtctcaaactcctggcctcaggtgatccacttgtctcggtctcccaaagtgctgggattacaggcgtcagccatcgcgcctaaacttagtttcctatcactgctgtaatttgcaaatttagtggcagaaaaacaatgcagatttgttatcttacagctctgcagatcagacatctgaaattggtccccctgggctggaatcaagttgtgaacagaaccaatttattctggaggttctaggggagaattcattcccttcccttttccagctgctgcctgcatgtctgggcccatggaccttctttcatcttcagaggcagccatgcagcatcttcaaatctctcagtctgaccctctggccttcctcttataaggacccttgtgatgatcttgcccttccccacaggtaatccaggacaaccttcccatctcaagatctttaatttaatcacatctgcaaaatccccttcacagctgggtgacgggcaggtggctgtaatcccagctactcgggaggctgaggcaggaggatcacttgagcccaggagtttgggaacaacgtgggcaacatagaaagaccctatctcaaataaaaaaaaataataataatagtaataatgatgacaatggccaggcatggtggctcatgcctgtaatcctagcactttgggaggccaagggggtgaatcacctgaggtcaggagttcaagaccagcctgaaccaacatggagaaaccccatttctactaaaaatacaaaaattagccgagcctggtggcaggtgcctgtaatcccagctactcaggaggctgaggcaggggaattgcttgaaccaggaggcggaggttgcagtgagctgagatcgcgtcactgcactccagcctgggtgacagagcgagactgtctcagaaaaaaaaaaaattaaaattaaaaaaaaagggaaaagaagaaaatggagaatccaggccgggcacgatggctcatgcctgtcatcccagcactttgggaggtgaaagcaggtggattgcttgagcttaggagttgaagaccagcctggacaacatggcaaaatgctgtctctacaaaaaataaaaaaataaaaaaaactagtggggcagagtggcgcagcctatatagttccagcgactctggaggctgaggtgggaaaatcatttgagcccaggaggtcctagttatagtgagctaggatcacaccactgcacttcagcctgggtgacagagcaagaccctatttccaaataaacgaataaaaaataataataggccggatgcggtggctcacacctgtaatcccagcactttggaaggctgaggtgggcggatcatgtggtcagaagatcaagaccatcctggccaacatggtgacaccccatctctactaaaaatacaaaatttagccgggcgtggtggtgcgcacctgtagtcccagctactggggaggctgaggcagaagattcgcttgaacctggaaggcagaggttacagtgagctgagatcgtgccactgcactccagcctgggcgacagagctagactccgtttcaaagaataataataatagtaataataataataataataataataacaaaatgggcatccggctgaagaagtaacatttgggctctcagggcaggggaggcacccaccgccagcttagcctgacgttcgcgttccttctcagttctgaagcgctgttgctcggctctctctgaccggcgccgctcctgggaaacggagaagcataagggggtgcagggacgtacccccagtcttccttccccagagtaggctaataaacagattggagtgtggccaccgacttgggtgaattcgcgaaagcctaaggctcagctctgtactaggaggaaaactattatctgcatctcccaagatgcaagggatccacatggagggaggaagaccggggggaacccggactctcggctcacaatgcgctccttcaaggcaaccagctcctcttcctccttcttccgctgctcgaaatgtacatcgatgagtgtctgcagctccagcaggtctttctccatgcgcttgcggtggatgtcctgcaggacacacgggcagcccgtcctaggagaccctggagggggcagcagcctcccagcacctcccccatgcaggatggtgaactgaaccgtttcccaggacggtatccagcaggtggcagcaatgcctcgtgtttgacactaatcagctcttccaaggacaggcttcccaaagacgggagtggggagtggggaccggcgcctttttttttttttttcctcccaggctggagtgaaatggcgcgatctcggctcaccgccacctccgcctcccaggttcaagcgattttcctgcctc[134 bp omitted]ctcccaaagtgctgggattacaggcatgaggccccgcgcccggccggcgccttttcatgattgacacaaaggccccttaaagactagcaactgcgcctgcggaggggtctcttgtcacttacatcgaagtcaacgcgctccccttctgggatctttggcgggatcaaaggaggcaccacggggcggctgagtggacagaaacacagagaccatgagtggcccgacctccctgagccacctcccacctccgggatgtgccgtccagtgaggtagccgccagccccgggaggctcctgaacgtggagggtcccagctgaggcgggctgtcagtgaaacacacaaaagaaggtaaaatacctcactactcatgtttttttggttgttgttggttttgttttgtttttttgacggagtcttgctctgtcacccaggctggagtgcggtggcgccacctcggctcactgcaagctccgcctcctgggttcacgccattctcctgcctcagcctcccgagtagctgggactacaggcgcccaccacc[138 bp omitted]cccggcactaatcatgttttatactgattacatgttgaaatgataaaacattatataacagattaaaaaaactgtgctatgaaaattaatttttcctatattgttgtactttaaaaaatatgcctagtaagaattttttttttttttttgagacagagcctcactctgtcacccaggctggaatgcagtggcgccatctctgctcaccacaacaacctccacctcccagattcaagcgattctcctgcctc[134 bp omitted]cagcctcccaaagtgctgggattacaggcaggagcccctgcgcccagccatttttaaattttttgtagagatggcgtttcacagcctgggcgcggtggctcacgcctgtaatcctagcactttgggaggccaaggtgggcgaatcacttgaggtcaggagttcaaaaccagcttgggcatcatggtgaaaccccatctctactagaaattaaaaaaaaaaattagctgggcatggtggtacgtgcctgtaatccctgctactcaggaggctgaggcaggagaatcgcttgaaccccggaggcagagattgcagtgagccgagatcgtgccatcgcactccagcctgggtgacagagggagactctatctcaaaaaaaaaaaaaaagagatggcgtttcactatgttgtccagggtggtcttgaacttctgagctcaagtgatcctcccgcctcagcctcccagagtgctgggactataggcgtgagccactgcgcccagcctttagtaagaaattgtaagtgacgtgtgtggcttgccatctatttctattgggtggtgccgctctgaggctcagccctcagcctgctctgatttcctgccacttccttggaattctcttttctgggtttctgagacagtgaagagcgattccaagatgaagcagacaggacttaggggatgctgggcaaggggagggaagaggtgaggacaatccccaagggtctctgggccagggggccaagtgtacagcagggccgtcatctccatcttggaaaagtcgataagctccatcagggcgtcatgtgtgggaataaaatatggcttaccatattgtacaggaatgaataccggcttgcctcccacccctctggctgttccatccctatctcctgccccgacagccccgtgagctgccagtgagctttccttttcccttttctcatcatcaatgccattcactccaatgacttcaggtatcatcaactgctgaggactcgccaactgtctctggtccagactctctcctaagccccagactcaagctaacaggtatctcctgaacttttcccaccttcccacacatgacgtcctgatggagctcaccaacttctctgagaaggagatggcagccccactgtccactttgttccccagcccagagacccttcggggttgtccccattgcttccctccccttgcccaacaatccccaagtcctgtccctttgccttggaatccctctcagtccattcccccaccccaccccaccccctttttttttttttgagatggagtttcactcttgttgcccaggctgccgtgcaatgacacgatcttgactcactgcaacctctgcctcccggttcaagcgattctcctgcctcagcctcccaaatagctaggattacaggtgcccaccacaatacctggctaattcttttgtatttttagtagagacagagtttcaccatgttgaccgggctggtctcaaactcctgaccttaggtaatccgcccccctcagcctcccaaagtgctggaattacaggcatgaaccactgcgcccggccccattcccttatttttatttatgttttagagacagggtcttgctctgttgcccaggctggagtacagtggtgtaatcatagctcactgcagcctccaaatcctgggttcgaacaatcctccttcctcagcctcctgagtagctggaatcacaggtgtgtgccactgtgcccggctaattttttaaaattttttgtagagatgtgggggatctcattttgttacttaggctgatcttgaactcctatcctcaagtgatcctcccacctgccgctgcgcaggcagagggcacagtgtgtgcaaaggctcaggggtatgaaagcacaggcatggctagagaaccatgaaacgctgtgtgtctgtcagtggggaaggcagatgccggaaaggtccgctggagccagatggggaaggctttgaatgcaggctagttgctttgactgcgtcttaagagtagtggggagttgaggaaagattctgagcagaggaggggcagggttagctctggtgttagaaaagtctctctcgagtcatggaggaggatgagccacaagttgtaggcagggaggccagagaggaggctggggtgatggtaaaggcgcgaggggaagagggaccactgggtggaaagaaggaaacagactggctgggcatggtggcttgcgcctgtaatcccagcactttgggaggccaaggtgggagaactgcttgaggataggagttcaagaccagcctaagcaacatagcaagacctcatctctacaaaaagaaaaaaaaaaaaaaaaaccaggtgtggtggcacatgcctgtggtcccagctactcaggaggctgagatgggaggattgcttgagcccaagatgttgaggcagtgggccaggattgggtcactgcactctagcctgggtaacagggtggagactatgaccacgatgaagaagaaggggaaggagaaggagaaggggaaggggaagaagaggaagtggaggaggaggagggaggaggagggagaggagggaggagggaaagggggagggaggaggaggaggaggagaaatgtcgactgctgtttcaatttcctccctccatctctgcctttctcacaccttgtctctgggggtagagggaatatttaggaagatgtatgactggggccccccaccctgtaggatctcaccttggtttggggcgttcctcttctgttggtggtgggggataaaaagagataattagcaagagtttagaggagaggggctaggcctgacacaccctggggagggaccccccaagcctcggcccccaggaccccagggaaggactctggagtccagttctggaggaggggggatggggagaagaaaagagggaaggaaagtcagggtggctgtaaaggaggaagagggtcacacgcatcagatatacattcagaactggtgtggggaccccccacccccactgtctgcacacccaggagtgcaaacccccagacctttctctatttatatgcccagagctcctgctctcctccattaggacccagcagtgcagggggtcccaacctctgtcttcattcagtgaccccagcgctctctccccagctcgccccctgcccaccgccccaccgcccccccgcccccggcccgaccttggagaccctgactcccagcgctcgcctcctctgcaatcctaaattccaagccccaacctttgaatgtatatgggggagaaaataacagacaaggttggaggcgaagataaggggggatggggtggtgcttctccgcaaacatccaacccttctgtaaagattcctccagactggggaagaaggcttgggtgtcggtccctttaagaaggaagggaaagggttaaagccactgcggggccatttcccttcccggccccgagagggcgcaggagctctcaggggcttaaaggaccgggcctgggggcgggttatgggggcggagggagggaagggtggtcttggaggttggggcccgaggatatcgggggtccccccgggcccccgacatcggtctcgggaagcgaagcagccgcggttacctggctctgccaccggctccggctcttcgggggctggggaggggagggaggagcagcgagggtttggggagcgaggggggagcggccacgcccgggcgcgggaggggagagagggaagagacgtgagaggctgttagaggaccgggagccgaggccgtcgggagccccatcccgccccctcctcccgggcccagcgtccccgcccccccaccccccagctccagacctgcggagtccgggacctcaccttcctcctcctcctccgcagcctcctctggagatgggggcacagaagagaaggcgttaggagctgggggagggatgggggcggtggccagagaccagggttccagtctctgctggacgggggtccctctggcctcggctgcgatgggcacgttccccctggcggtgcagggatggcgcgaggagacgctccagacccggagagggcgggcgagggcccgagggctgagccgccccttccccgccaaagtgccacactcctcgcctcccctcccaagagctcctgggcgtgtccccatcccatagggccggcccactccctactcaccttccggctgctccctgcggacgggtgtggggagagaggagggaggggagagttagacctggggtgggagagcctctccaccactgcacgccccaacccctcccagtgcagcactcactcctcatattcctgctcctcggtgtccgacatcctggtgcggcctaaggaccagagagaagaggcccagtggggtggggccccaaggagggggcgacctagactcctgggtgtgagggaggaggggctgggggcctggactcctgggtctggactcctgggtgtgagagaggaggagctggggtctggactcctgggtgtgagagaggaggagctggggcctggactcctgggtctgaggaaggaggggctgggggcctggactcctgggtctgagggaggaggggctggggtctggactcctgggtctgagggaggaggagctggggcctggactcctgggtctgaggaaggaggggctggggcctggacttctgggtctgagggaggagggactggggtcctgaactcctggatctgagggaggaggggctgggggccggattcctgggtctgagggaggaggggctggggggtgtgtgggagggtgggtgtggactcctgagactgagatgggttgtcctggacacctgggtctgagggaggaggggctggggtctggactcctggatctgagggaggaggggccaggggcctggacgcctgggtctgagggaggaggggccgcgggcctggacgcctgggtctgagggaggagggtctgggggcctggcctcctgggtctgagggaggaggagctggggcctggactcctggatctaagggaggagaggctgggagtctagactcctgagtctgagggaggagcgggctgggggcctgtactcctgcgtctgagggaggagggctcaggtctggactcttgggtctgagggagggggccggctgtcctaaagcatgcatgaggacagaccttggtaggtgtggtcctggcacagccaggaggctgcagaccctgccccctcagcacagctgtcctcttttgtcttatgacaagtccatgggaacctgatccagttgggattaggaagaggcatttgagaagggacagtggcctgaagacaatagctgccccacccccaggagctattttggggggatgtcatagatggtgaaaccgaggacatttcctaagaagggatttgaggaaggggggcttctgggagaattagtcacccgcatcccctctcccactcgccccaccccactggctggtttcctccccacctgtctcccctttcaccttcccatacatcacgtagggggcaggggcataaagggcaccttctgtccgtagacctcaccctgacccctacattcttagacctcaaagtctttgagacaccctaggccacagggtgcctagccccaaatcccaatacccacagattctgagaccccgatttatgatgcccgtgtttctgaggccagcaagtcctcacagctctggattctgaaatcccagttcttgatagtccagatatgggccgggacatcctaagaccacccccaggtcttgagacctcctaaaatctgaaacctcaagaatatgagacccccaaaatcttgatacccaaactcggaggcccagttcatgataccccagataatggcactctaagttttcatgctttctatcataatgtctcagattccgagccctccactaccaaaaccccaatttcttctgagacccccccaattcctgataccctcagagtctgaggccccaaatcctgacacccagattgtttgacctccaagtccagatatccctgactgctgagatttcccccagattcccagaaccccaagatcctaggaggttttattctgggacatccaagtcctggcagccccgggttaggatttgtgtaacccacaaatcctagtattttcccctctatcctgagtccccctaaagtctgagcctctcaagttcccagacctccagttgtatgccccacctacctctgcaccatttctccacacccgacatcttccccacctgcctcctgccccctcccccaaggacatggtttttgaagaccacagggctccgcagagccccttacctaggctgtgtctgagatgctgtgaatcttgaggctgagccttgctgagggcactgaagctccggggagtttatagctggaggctcgggcccgccccgaggggagagggagggggagagaattcctttgctcaaacacaagcctgggagttcagagacagccctgctgcccctggctccacactcagagtccagaagcctccgtgggcccctccccaaccccatgccaaccccatctgcatggcccaggagccccgcccctgctcccaccccacaccccaggctcccgtggtgctccaactacctcccttatagctccctgtgctttgacgtccccatgcccggcacacagtaggtccttggaggacctactaatgacacatgggctataaggaatgtttcctgttttcttctctctgttccctctttctatctaggtctctttctggacccccatttctgttgtctctgtggctctccatctgtgtgtctctgtgtgtctgtctctacttcttagtctcctcctctgtctctgtccatctttttgtctcctcctcccacccccacccctttgtctgccgccaggattccatcctggtgacaacaggcactaaagccgggaagcaggtgtggggagggggagggggagggtggggtgtcaattagggtgaaacctaccctccctccccacctccatctaacgctgatcttttttggtatccccctcccgcttcccagccaagccatgaccttgagttctaggttcaagccagccctggagagcaggcttcctcaccctccccgcctctccgtacctctgtctctggtggtctcggtctttgtgtttctgtgcatttctcggggccccttgctgggtctgtcttgggctctctctgcatctgtcgctttctgagcccctcagtgtgtttctcggcatgtgtctccgggtggttttgtctctgcatttctgtgggtgtctctgcatgtctgcccctctcagcgtttgtgtctgtgggggctcacagtctctctgtgcatttctgtccacctatgaccccatttctgtctctttttggctctgggtctctgtgtctgtgttcacgtctctatctttctagttctctccatgtctctcttagtgcccgcagttccccctctgtggctctccatttccatctcttatagggtctccatgtctctgcaccttgctgtgagtatatctctgtctctcttttctcctttctttgcacttccttctatgcatcttgtggtattttctccctctctctttgggtctttgcctggctcctactctctctactcccaactcagtctctctgttgtcggtcatgtctctctgcctgtctgtttctctgtgtctctctctctttgacctttagtcttggcatctctgtgcactccacatgggccagaggagctgtgacaatagagatcagaagactgatggaatgaactgtttgtggcaataagataccaaattataaacaagacctaaggccatgccaggcaagggttaagccacgcatccctacacttatataatcgactatgttccaactgccacaaggcttttcctttttctagcagctaaacaagcaccggcctcaagataagcaatattacaaccattgcagccatccattgccagatgctgactagctgaaccccctgttccacaaggcataactacagcattagttgaacaagagactgatttcagtaactttctcctgataagatgccgcagaccacggactggttctggctgttgacagaggctgtgcactgagtgtcttcatatccctgcttcgtgtttcgatacgaatgcattcaatggaatgcacttaaatgttaagcct[140 bp omitted]ggtgaaaccccgtctctacgaaaaacacaaaaattagctgggcgtggtggtgcatgcctgtaatcccagctactggagaggctgaggcaggagaatggcttgaacccaggacgcagaggttgcagtgagctgagatcgtgccactgcactccagcctgggtgacagagcaagactccgtctcaaaaaaaaaaaaaaatgagtgtttgcttgtcacacatgcgtgtgtccatgtgtccacctgtccatgaatattcatagctccttctataaccagttgaatacgtgcacttagctaacccactcagcataaattcctgccttgcccttccctcccttaaagtgcctgcttttgttttttggcaagaagccatgcttctggtcttcaggttgtgatccgcttcttaagaaacaaagctccgctctccaaattcatgaaccccgggattcttttcaataacacagccaagagtgcttcacatgggagacccatctggtccccaacctgctgtgtggctttgggggagccccacctgcagtcttcccatctgtctcctgcctaagccctgggtaatagacatggagtcactttcagctcagagagaagctttattcctcagggccctcctcagggcaggggcagtaggcaggaaggctcagctctcaaactttttcttgcggccctccattccactcagtgcatcgatgttcttgcgccagtctcccacctcccggttttcctggaggatggcgatgagtcagaggttagggtctcttcttggtctccagtctctcaagaatccctgtcttccctccagcctgtggggccactctaccctggatgcctaagtatctagttctggagcacttcctgtcttttcaagataatccctgccaattttccccatgcacttcctgtctccctcatgcacttcctgtccccctcatgcacttcctgtctttccccagcacttcctgtctccctcatgtactttctgtctttccccatccacttcctgtctccctcatgcacttcctgtctttcccctccacttcctgtctccttcctgcacttcctatctttcccctccacttcctgtctgccttatgcccttcctgtctccttccttctcttcttattatagtagtccctccttttctgcaattttactttgtgtggtttcagttacctgaggtaaaccatggcccaaaaatattaaatggaaaattccagaaataaacaattcataagtttgatggattctcaggtcaatagtagcctaacgccaggtcataatgcctatgtcatccacctcacctcatctcagcacataggcactgtcattttacatcacaaggaaaagaagggtgattacagtgctataagatattttgagaaagagaccacattcatgagttttattacaatctgttataattgttctattttattattattattatttgagacagggtctggctgcctcatccaagctggagtgcagtcgtgcaatctcggctcactgcagcctcaacttcctgggctcaagccatcctctcacctcagactcctgaggagctgggaccacaggtgtgtgccaccatgcccagctaacttttgttctgttttgttttgttttgagatggagtctcccagtgttgcctgggctggagtgcagtggtgagatctcggctcactgcaacctctgcctcccgggttcaagcaattctcctgcctcagcttcacaagtagctgggattacaggcacccacgaccacgcccagcaaatgtttgtatttttactacaggtggggtttcactgtgttggccaggctggtctcaaactcctgacctcatgatccgcccgccttggcctcccaaagcgctgggattacaggcacgagccaccacacccggtaactttggtattttttatagagacatggtctcgccatgttgcccaggctggtctcgaactccagagctcaagcaatctgcctgccttagcatcccaaagtgttgagattacaggcatgagccaccacgcccaaccttcttttgttgttatttattgttaatctcttactgtgtctaatttagaaatgaaactttatcataggtatgtatgtgtgtataggaaaaaaaattacatatagggttcagtacaatccatggtttcaggcatccactcctatctttcctgtcttcttctttaagatagggtctcactgtattgcccaggctggagtgcagtggtgcagtcatagctcactgcaccctcgatctcatgggctcaagcgattttcctgcctcagcctcctgagaagctgcatgccaccaccgtgactggctaatttaaaaaagaaatttgtagaaattaaaacaacaacatggtggtgtgcacctgtagtcccagctactcgggaggctgaggcatgagaatcacttgatcctgggaggcagaggttgcagtgagccgagatggtgtcactgcactccagcaaccgagatggtgtcattgcactccagcctgggcagcagagactccatcgcaaaaaaaaaaaaaaaaggaaattaaaaaaaaattttttttaaacctcaaagattacaggcataagccactgcacctggaccttcatgtacctctttgctcttacatggacttcctgtagccctaatgcacttcctgtcttccccttctacttcctgtcttcctcttgcatttctgaggaccccttactagctgcttctacctccaactccaagcaccatctgccctcaggcctagggttgttggcacccacagcccttcccctcagcatcctctttcctggccttagcccacactcaccttctcggtgtcctccttcttcacctgcttgaggtgggcccgcaggtccagggactccttagcccgggcccccagcagcgcctgcatcatggcatctgcagagatcctcactctccgcagggtgggccgcttaaacttgcctcgaaggtcaaagatcttctgagtcagatctgcaatctgggggcacacgagggggtgggtacttctccttccatttcccgcacacccaactcctccatcctacactccttttttattctccttatctcgtcttccagtaccgaggccttaccagtctcttcccggcttaggctcccagtctaggcttctaatcctggaactgaatccccctcctcatatgctccagcctcacctctcaaaaccactggcataacctggtccagctacatgcaaatcacaattccctggccagtgcctgagctaatttaccaacatgtgatgccctgagcatgttcactaacttattttctgtttcccaacccatggccttgcatgtgctgttccctctgcctagaacagctttccttgactatattgtactcatccttctgccccagccctgccaggctcacagttgtcctgggtctcctgggatgtgcagccaaaagcagctgcaaggggtcaggcagagaccaagtcccagccatctcaccctaccccgaaggtacccgagctgcccatgcgtcccacctccgtgatgttcttggtgacttttgcctctatgtcgtatctctcttcatccaccttgtccacacgggcgtggagctgtcggcacaagtcctggaggaggaacgtggtgtgtgttgttgggggaaccaaaaacagggagacctggactcctgggtctgagggagaaggggctcggggcctggactcctgggtctgagggaggagaaggggctgggggcctggactcctgggtctgagggaggagttgggggcctggactcctgggtttgagggaggagaaggggctgggggcctggactcctgggtctgagggaggaggggctgagggcctcgattccagggtctgagggaggaggggctggggactggactcctgggtctgagggaggaggggctggggactggactcctgggtctgagggaggaggggctggggcctggacttcagggtctgagggaggaggggctggggactggactcctgggtctgagggaggaggggctggggcctggactccagggtctgagggaggaggggctggggcctggactccagggtctgagggaggaggagctggggcctggactccagggtctgagggaggaggggctggggcctggactccagggtctgagggaggagaggctggggcctggactccagggtctcagggaggagaggctggggcctggactccagggtctgagggaggaggggctggggcctggactccagggtctgagggaggaggggctggggactggactcctgggtctgagggaggaggggctggggcctggacttcagggtctgagggaggaggggctggggcctggacttcagggtctgagggaggaggggctggggcctggacttcagggtctgagggaggaggggctgagggcctcgattccagggtctgagggaggaggggctggggactggactcctgggtctgagggaggaggggctggggcctggactccagggtctgagggaggaggggctgggggcctggactccagggtctgagggaggaggggctggggcctggactccagggtctgagggaggaggggctggggcctggactccagggtctgagggaggaggggctggggcctggacttcagggtctcagggaggaggggctggggactggactcctgggtctgagggaggaggggctggggcctggactccagggtctgagggaggaggggctggggcttgggcttctgtctgggataggagggccacatggtcctgaaggagtaggttggagccaagactccacagacctgcacacaaagggtgttaggggccaggagtcccacgaaccatatataattgggtaaggacagccatattggacgcctgggtcccgagcagaagaggggatagaggctgtactgctgaattccgggactagaaacctcgcatccttgggagccggtacctgcagctccgcgaagcccagcccggccaactccagcggctggcagcgggtgctcagagcgcgccccttctctccgcgccgctcctccgcctctcgctccagctcttgctttgcaatctgcagcagcagagtctgcagaggggtgggagggaagcgcagcccacccggggcttcaggataaagaccaggcgtggggaaccgcctctgcccttctaaaccctccagtttggtctccactgttccaaggccccgtcccaccccgagcagtactccccgctaaagccacgccccgagcggccaaaccccgcccacttccgcccacctaccccgaaagccccacccattctcaagctccgccccctgagcacctgcctgctctttcccagtcccgcccgtcctcaccttcagctgcaattttctcgaggcggagatcttagattttttctgccagggtgagatggagcaaggaaggatcatggagggggattcggagacgacggtggaggggacctcaagacacccccagcaaacccagccggtccagatttgggcccacgtccaacttgagccctgagtctacgggaggccacgcccctcattcccatccaccaatctgggtctcttcctttggataggcacttcccatctatccctaagcaagtccgagggcaacggagttccgcccgcaggctgctgtcaccaatccgagcatgaccctctgcaaaactccgcccctgaagcccctccgcgtagtccccgcccccttcgcagccctggctcctccccccactcccagggtcttggatccctccggcgcctgtactctgcccccaggaagccccgtcccaccttggcgtgcggctccgtggcataagcgcggtagttggaggagcggcgtctgattggggctggtgcagggcgaggttccctagcctgggttaggaggagtggggaccccatcaccaccaagaccccacccagcccttaccgtaccgcaccctctgctagggctgcagcctcccgccccagacccctcactgcagcgcccaccctggccctgggggtcccagccacgccttagcccgctgctctcaccgcatcgctgctcctggaaggagagaaaccaaggaggggggttagtggtgggctgtgtcctgtctcctaagggacccctggagtcccctctgaacaagaggtcgggggaccgcgcttccccttccttgggttccaggagtctgactcgcaaacccacttcctctcttcacccaagagtccctacgcctacctcgcaggccaagggtccagcctctcagctgcgacccctcttgggaacccgggaggtcgcccccaactcccactgccttggggcatcactcacccatccgccatgctgagactcaggccgggaatggcaggaggcagggcgaggacaggggcgtttggagggtcagtgagggggccgcccgggtgaccttcagggtcccagggaccgtcagtctcctccgggctgcttgagactccccgaggacactgagataaagggcgaggacacagactaaatatactgtcacctcctcctccccctgcccactatgccagataacgggggcgcgtgaggggcggggtgggccctgctccagctggatcaccagccacctccgggcacaggaatccggaccctcctccctctgatcctggagtcctagacccctcctccctcagacccagagaatgcccgacctcccaacctcctcctccctcagtcccaggaccctgggagaccctggccactccctcacacaaggagtccaggcccccagcccccttttccctcagactcaagtgtctgggcccccagctcctcttccctcagacccaagagtccaggcccccagcccctcctccctcagacccaagagtccaggcccccagctcctcttccctcagacccaagagtccaggccccagcccctcctccctcagacccaagagtccaggccccagcccctcctccctcagacccaggagtccaggcccccagcccctcctccctcagacccaggggtccaggcccccagcccctccctcagacaagggagtccaggcaggcccccagcacacttcctctctcagactcaagagtctgcaccctcagctcctcctccctcagaccaggagtccaggaccccaatccctctcccctcagaccgaggagtccaggaccccaatccctctcccctcagacccaggagtccaggccactcaataaatgttgttgattaatttgaggatgcagctgtgctcggggctagctctcagtcaatagcactgggaaatccatccctcgtccacttggaaacccaggaatctggtttctggcttcctctgtccagcactcctgggcctttctctcccagccctggagacggacataggacaggaaagacgcttggacacacagaagggtggacacaacttgctttacttgaaccatctgggtgctgaccaggccctggtgaggagacaccccagcccctagtcagccacagggtgcctgggaacaagggggccaaagtcaagggcctgagactcagtgtcagatcctaggctgggcttagagcctcagaagtggaatttggaattctgagagaacaatctagaattctaggaatagaccatagaatctcagaaatggaatttgaaagtctaccaacactcccggggtgggggtggcgggtactgagtgggaatgattagaataaaattgaggactctagcagcggacttagaatggtatcagcgggttctcatcctacaacctgactttggaagttggagataaggggtgtctaggggttgggtcagactccagttttggagtctgactcacagttgggcggagccaaggccccctgaggctgagccagaacctctgagagtgaacctggagactcagagggcagctggcagggctcacagtgtggggtcccaccctgcagaggctgggtcaggccctcaagggctgggttgctggcttcaagaggctgggccaggatgtcaaggggcggagttccgggttccacagctgggacagtgttgcccagagctgattcctgggacttgcagaaacgtgcgaaggtctctgaaggcctggccccggtctgtggagcaaatccagctgcctgagctagctccctgacccgggtgttgaatccctgcagctgctcctgccgcacgtccaccaggtacctgcagatgggaagcgccctgtcagggacccagattttgatccccagccaggatgttccccaccctccaccccactgactcaccgggctaattccacaatcaagttccctccgggtgccacacaggccccaagctcagggatgagaagatggaccatactgcagagaggacggaggacaggctgagattcagctccaaatccggagggaggatggggctctgggatcccagacaatgagggaggaggggtggcaaaactggagtctgggtcctggggaaagaagggagcaggaggtctggactcctgggtctgagggaggaggggctgggggcctggacccctgggtctaagcaaggaggggctgggggcctggactcctgggtctgagggaggaggggctgggggcctgatcctgggtctttgtgagcacagctgcctccccgcttacccacaggccacatagaggagctggaatcggccgttgtagcagctcttgtggtggagagtctgagcagaattgagcggcaggaagtggacggtgaaagattccggggtcggggctgctgggggaaggggatagaggggtcacctctgacaggcggagccataagggcggaaaaccagagagatacacagagctgggcagagctgggcaggcacacaggacttggagataacactttttgtcctcttgcagctttttaaaaaatcctctaaggtaggctcctggaaagttctgggaaggtcagcctggcaggcagagactcactgtacagatcaggcaactgagactctagagagggaaagagggtgggtggccagggccacatgtgacatgccctgtcagacagacacgcagggagggccaggttggaggatggctggaaggaggcccagccaggatccagggtgtgggaggctgtccaagggggagctgggacccagcaccctgtgagaatattcttggatagcttagccctctgcagataagattagaattctgctagtggaattcagaattctaagcatgctctcagaatttaggaaagggagagaaagagagaaaaagagacagaatatcaagaagccgtcacttgcccaggcattccaaatcatgtcagtccacactccagtgtgaaacacctggaggctggagtccctggcttacctgttgttgtccctggcttacctggagtccctggctccgggcttccctccgcgtgctgctgctcctccaggtcccccccggtggctctcgcgcgcccccaggcggccacgtcgcggagcagctccgtcacgttgtgttgagtgatctccccggccgtctaacagtagaaggggcgtggccagacgtcggggccaggatggcggggcggggcttagaacgctgggagtcctcggtccaggactagaactcccgcagctgcttggaggatgtgaagtggggcgggacctatcccgcggggatggggcctgttctctgaatggagtcgttcccaccaagcgacgggcggggtctggagctgggggcggggcctgctgtgggggcggggccttgcgcacccaccgacccccagccccacctctacccccagtcccagcctcgccgcgcaccttgactggctggccgttgctcgtccgcaggaggctctcgtcgtccgcttcgatgccgaaggccacgaagggccccgtggcgatgtccccccagtacccgcgcgctgccacgcgctccccacgctggaaaaggagggagagaggaggcaggtgaggtcgatgttggggcccctgactcctaggactccgagcagcagcagtgggccaggacaggcagtggacacgcacgtagctcaggaggcgaccggacgccagggtccggttgggcacatgataggcgctggagtccctgagttcaaaggcgacgcctgtgtcccgccagcgtcggaactcctgggggtgaatgacttgagcctggggtggggggcgggaagaagggagccctcagtgaaccgagcgtggagagacccctacaccagcctccctcagacccaggagtccaggtccccaggccctcctccctcagacccaggagttcaggcccccaaaccctcctccctcagactcaggaggcccccagcccctcctccctcagacccaggggtccaggcccccagcccctctcctgggcccctcaccccgcggtcatgcagcttcatgcgcaggtcccagtcgctgacaccgcgccgggcgtcgtagcgggagcccaggtagtggcgcaggcgcgagtcccagaggcggctcatggggaacgcctggggccctttctcgccgccagcccagaagcggaatacggcctccagggcatcccgctcgcggaactgcggggccaggcacgcggtgggacagaggaaggcagagagggatgcagggagagcggattctaattgaccctctcttccatcccagaacaggggaacgattcccccgtttctcggatggaaaaactgaggctccgaaagcagaagccacctcctgcccccaggccaaatcccacagtgggagtcggggaactgggattcgaaccccctagcccgccgcctgctccatcaacgcacgtcctttggactgtgcgcttccattattcccgcggccacccgatcccagatggaggccgggcggcggcaccttgagggcgcggaggctgagccagggcagctgttcctccaggcggtcgggctcggggaccaggtgcgccagcaggtcggcctgggcacgcacgaaggcggccactggcgggcgcagcagcgcgttcccccacacttccaggaaggtctcgcttcgctctacggagagagggagataattgcgggaatgtgtggaggagggagcccagaaattacacccttaatatgttattatgtcatagtcatctaatgaaaacaatgaacccccgcaaactccccacgcatcccaaaaactacatgaagaacagggccggacatggtggcgggcgcctgtaatcccagttactcgggaggctgaggcaggagaatcgcttgaacccggaggcggaggttgcaatgggccgagatcatgccattgcactccagcctgggcaacagagtgagactccgcctctaaaataaataaataaataaccacctagaagagggaattagagttgcagattccacactcaccgcagacagagaatatttgggggaaaagataacaacacaacagtaaaaaataatacaaattgtaaaatatggtgtaagcatttacattgtattacatattataggtaatctagagatgatttgcggtgtatgggaccatgtgtacaggctatttgtaagtacatcttttttgttttgagacagtgtctcactctgttgcccaggctgaatgcagttgtgccatcatagttcactgttacctcgaccacctgagcttaagggaccctcctcctccagcttcccagctagctggggctaggcattagctaccacacccagctaatgttttatttctttttcttttctttttcttttttttttttttttttttttttttttttgagacggagtctcgctctgtcgcctagactgtagtgcagtggcgcgatcccggctcactgcaagctccgcctcccgggttcacgccattcttctgcctc[373 bp omitted]caggccagtctcaaactcgtggtctcaagcagtcctcccacctcaggctcccaaagtgttaggattacaggcgtgagccaccgcccctggcaatactatacaattttataagggacttgagcatccttggatcttggtatctgcaggggtcctggaaccagtccccagtgttactgagggatgactgtatatacctttgcatataatatatatacacatagacatacaaatagtttcatgttagttgtttaagaacttaatagaagagaactatgtgcctttagtaaaatagatcagtttagttctaactgtttaagaactttgaacaatctgtactgtgcaatgtactctgaattccctgggtcattaatgactgatatggtttggatctgtgtccctgcttaaatctcatgttgaattgtaatccccaatattggaggcggggcctggtgggaggtgattgggtcacaggggcagatttctcccttgctgttctcgtgatagtgagttcccacaaaatctggttatttgcaagtgtgcgcctcttccccactgcctctcttgccccttttcctgccgtggaacagatgcctgcatccccttcgcctcctgtcatgattgtaagtttcctgaggccttcccagccatactccctgtacagcctgtggaactgtgagtcaattaaacctcttttcttggggccgggtgtgatcgcacccgcctgtaaacctagcactttggcaggccaaggcgggcggatcacctgaggtcagcatctcgagaccatcctggccaacatggtgaaaccccggctctactaaaaatacaaaaccttagccgggcatggtggtgcatgcctgtaatcccagctacttgggagactgaggcaggagaattgcttgaatccaggaggcagaggttatggagagccaagatcgtgccattgcactccaatctgggcaacgggacaagactctgcctcaaataaataaataaataaacaaacaaacctgttttctttttctttctttcttttttttttagatggaggttttgcttttgtcgcccaggctggagtgcagtggtgtgatctcggctcactgcaacctctgcctcccgggttcaagtgattctcctgcttcagcctcccgagtagctgggactacaggcgcctgccaccaca[132 bp omitted]acccagcctctcctggaattttctaagtggctctaagatgtattatatttagccccattttacaggtaggaggagctgaggctctaagatggcaaattacatcagaggggaccatcatcaataaatatattggattttttttttcatcagaggtaccacactggaaaataccaaacatttttggtttttagatggagtttcgctctcttttttttttttttttttttttttttgagacggagtctcgctctgtcaccctggctggagtgcagtggcgcgatctcagctcactgcaagctccgcctgccgggttcacgccattctcctgcctcggcctcccaaagtgctgggattaacaggcgtgagccaccgcgcccggccggagtttcgctcttgttgcctaggctggagtgcaatggcgcgatctcggctcactgtaacctccgcctcccaggaaaataaccaaactttttaattgtaccattgaaatgccagaatccctctagggagggggaggagaccagcggtcagaatgcctgggtcctagcaacagaccttgcagccccatcttctccggttcctccagggctaggctgaagatcagcatgtgtcgggccacagcttccagattattctccagcacaaagaactagaaggatggacagggcagaataattctgagacctgtttgcctgggtcctaggagacccaggagagcaggccctcagctctctccttccacacacccgagttctgtacaccagcctcttccttcaaacacagaagtctgtgtccccagagctctcttcccttccattactcagaagacctcatcctcgagctcttccccactatagaacccaggagttccaaaccccagccccttccttcccccaagacgcatcggttcgctcccagcttctgcctccctcagatctaggagtctccagccccttcattcctggacctgaggttttagaatttcaatcccttcctccctcaaggactcgggaatctgggctctcatcttcatcccagctcacgttgaacctcctgcgaggccagaacttcgctcgggacagggtccgcagcaggtgccgtccatccacagagcccagaagcagcacatctagctcggggttgctgtgcactgtatcggcctgggagtctgggtccacaggaggacctggcaagatgacagctggctggggcaccatggtggttggcagagcgtccaccgtagcatcccctataaaaaatggactacaaatcccagtaggcgttccgcccgtggcctaggttctaaggggaggtgtttcctctgagtattctgggattcgcagtccgcagacaggacctcggggctgcccctgggagcgcgccctctgccgctggagcgttggagaacgttagcgccccccttgccaccgacgctgggactacgagctctaaaaggccgtctgctcaggctgggaaggcagacggtgtatcagaccttgcgtgctgggactcactttcagcctgcaggtccagcgccggggacaggccccaccaggacacggagccgaagccgctgccggagccggcaggtgtggtcatcaccctgcggaaaagacattctgggaatcgcacacattgcccgccccgctcccctctcaccgcccctcacttctcgcccctttgcctccacatgataccttgcccacacctttatcctccaaatatcccgggacgccccttcctctctgctcagtgcagcactgtggacccgcggcactccacaaccgctgcccagagtccccgcccttttcgaggaatcaagcaatggaagcatgtgggatgggaccacagcgagcaactgaccaatgagagtgagcgaggcccgccctctacaaacttttggccaatgggagcactgagggccagccttcccccacacctaggagaagagggcgtgtggacgcggttgtcatgacgacggcgccggcgggggaaggggcggtgctagaacaggttggggcggagtcagggtcggtccaaatttctggaatgggggaggcctgggctgattaaaattgagagtgaagggagcttaatcttatttcttgttttttgtttttttgttttcttcatatgcctttgctcatacgtaacggaattttcatcaattcaaataaagtgaagtgtctagactttagatggcaggcttctgagcccgctccccgccccagcacaacgtgggctctaccacacagaacagcccacaggtgggacactgatgtgcaggtcattaaaaattcagggatttgtgagctggttattgttacacgaagccataatttaaacttacagctagatccttttgtagtttctaagcgggatgattgggtgttcacgcgcatgcgtgagatgtgcctccctcaaaccttgttacgacatcggcacattactcttctgacatgaacaaaaaaattacaggtaaattctgtaatcgtacagttaaatcaactgcattaaaataagggtaagtcggccgggcgctgtggccacgcctgtgatcccaacactttgggaggtcaaggtgggcagataacttgaggtcagaagttggagaccagtctggccaacatggtgaaaccgcgcctcgaccttaaaaaatacaaaaattaaccgggcgtggtggcacgcacctgtaatcccagctactccggaggctgaggcaggagagtctgttgaacctgggaggcagaggttgcagtgaactgagatcgcgcctctgaactccagcctgggcgacagagcaagactctgtctcaaaaaaaaaaaaaagaaaaaccaaagtctgaatgaggcacatctctagatcaccccagcacccagcactgggctcagcgcccaaggggacttggctctctgcctcctctccttgcccagacacatgagcttagaccagtcaccctttctgagcctcagtctgctgctctgtgaaatgggaatgtagcgtgcagcgggcagaggtgcagcggatctgcctcctgagggcagatctgggcactgggaagacaatacctactggggaaacgaaggttgagacctcagacattcctgcagaatcaggctggctaaccagccccttccaggccagctctaagcctgcaagagccccagatcctgggtttctctctggagaattaatgcctttcctccctatttctcccactctcccaacaaattctcagcaaaggaaccagagtgacattttttttttttgagatggagtcttgctgtgacacccaggctggagtgcagtggcgcgatctcggctcactgaaacctccgcctcccgggttcaagcgattctcctgtcccagcctcccaggtagctgggactacaggcatttgccaccacaccagctaatttttgtatttgtattttattttgtgtatatatatatatatacacacacaaaataaaatacaaatatatgtatatatatttatatatacacaaaataaaatacaaatattttgtatatatatacaaaataaaatacaaatatacatatatatacatatatatatatatatatatagagagagagagagagagagagagagagagagagtttcactcttgttgcccaggctggagtgcaatggcgcgatctcggctcaccgcaacctccgcctcccgggttcaagccattcttctgcctcagcctcccgagtagctgggattacaggcaggcgccaggacgcccggctaattttgtattttttgtagagacagggtttctccgtgttggtcaggctggtctccaactcacgacctcaggtgatctgcccgccttggtctctcaaagtgttgggattacaggtgtgaaccaccgagccaggcgatttatttatttattattttttttttagagacggagtcttgctctgtcgcccaggctggagtgcagtggcacgatcttggctcactgcaacctccgcttcccgggttctagcaattctcctgcctcagcctcccaagtagctgggattacaggcgcacgctgccacgcccagctaattttttgtattttagtagagacgaggtttcaccgtgttgcccaggctggtctcgaattcctgagctcaggcaatccacctgccttggcctcccaaagcgctaggattacaggcgtgagccaccgtgcccagctccagcgattcttttttatttttagtagagacggggtttcaccatgttagccaggctggtctcgaactcctgacttcaagagttccgccggcctcagcctcccaaagtgctggaattaccggtgtgagccactgcacctggcccagagtgatcttaaacataaatcaaataatgtctcccacctcttcaaatcctccaaagtcttcccgctgcacctggacacattccccgctccttagcttggctccctatgccctatgcaatctgcagtcatccacccctgaagccacatcagcctcctggctccttggagaacacaccaagccgtttgaaccccagggcctttgcaacttgggattcttttgccttaaattatcttccccctcatctttgttttctatatatttatttttgagacaaagtcttgctctgttatccagacttgagttcagtggtgtgatcatagctcactgcagcctcaacctctcaggctcaagcagtcctcccacctcagtcccctgagtagctgggaccacaggcaagtgccgccatgcccggatatttatttatttatttatgtagagaaagggtctcactagttgcccaggctgttatttatttacttatttgagatggagtttcactcttgttgcccaggttggagtgcaatggcgctatctcggctcactgcaacgtccacctgccgggttcaagccattctcctgcctcagcctcctgagtagctgggactacaggcatgtgccatcacgcccagctaattttgtatttttagtagagacagggtttctccgtgttggtcaggctggtctcaaactcccgacctcaagtgatccgccggccttggcctcccaaaattctgagattacaggcgtgagccactgcgcccggctgtatttatttatttatttatttaaggcagggacttgctctgttgcctaggctggagtactccagcctgaaactcctgggctcaatcgatcctcccacctctgctccccaagtagctagaactatagccacgtgccagcatacctagctaactttacaaattttaaaaatagagaggttatccaggctggtgtctaaccctgggccccaagcaatcctcctgcctcccaaagtgctaggattaaggcatgagccatcgtgcttggccttgttttctttttaaattggtgtaaaacacacacactattaagttgattgggaatgacatttagtacacttgcaatgctgtgcaaccatcaccactgtctaattccagaactttctcatcactccaaaagaaaacacgtaccccatttatctccccatttctctctcctctgtccctggcaaccacgaatctactttctgtctctatgtatttgtcagtgcaggagatttcttttggatggaatactgcactatgcagccttctgtatccggcttccttcacttggcataatattttcaggactcatctatgctgaagcatgaatcaatgctttcttctgtttttatgaccaaataatattccactgttgttctccctaacctttgcaagcttcgttccttcttgtcattcaagtcatggcccagaccgcacctcctcagcaaggctgcccctgaccaccctccctaagttatgtcagcctttttacgttttggtcccagtgtggacggccatttgtaatggttttattcttctatcgctctgctttcttgttgagacagagacccaaggaccccattgccatcatctaaatcaatcccaggatttagagacaggctctctggctgtgtgattctgagcatttcacaggaattctctctctctctctctctctctttttttagatggagttttgctcttgttgtccaggctggagtgcaatggcgcgatctcgactcactgcaacctccacctcctgggttcaagcgagtctcctgcctcagcctccctagtagctgggattacaggtgcttgccacgacacccagttaatttttgtatttttagtagagacagggtttcagcatg[136 bp omitted]tgggaataatgatcatgtttatttcatgagtttgctgtgaggattattattggcagtaatagtagtaacataaagggctgtcttcataaagacatgctctacagccacacacacacacacacacacacacacacacacacacacactcacacacatgaaaagttactgaattcctttggagaaaaattaaaaatctcatggatattataatctgtgtagctgttctattttcactttcccgattggctaccaggaagcttaggagcaagtaagtttgtttgctgcctccttttttggtacgtgggggtaatttttgcctcattctccacttaatctgctgctcagagagttctctggccaaatcttataggtctttgttcaccacccaaaattctgtatgggatgagataaggtagaagccaatggaactatcatctttgctagaaacagagtaggaggcagcattcgttgaaagaacaatgaggtcagatgcggcggctcatgtctacagtcccagctactcacacaggaggattgcaggagtttgaaaccagcctgtgcaacatagcaagaccccatctctaaaaaagaaaagaaaagaaaagaaaaaattagctaggcatggttgcatgtgcctgtggtcccagctactcaggagtctgaggcaggaggatcccctgagcccaggaggttgaggctgcagtgagctatgattgccccaccgcactccagccagggtacacagagaaaccctgtcaaaaaaagaagaaagaagaggctgaggcagaagaatcgcttgaacccgggaggcaggggttgcggtgagccgagattgcaccattgccctccattctgggcaacaacagcgaaactccgtctcaaaattaaaaaaaagaagaagagaagaaaagaaatagaaaagaaaagaaaagaagaagggccgggcgcggtggctcacgcctgtaatcctagcacattgggaggccgaggcgggcggatcacgaggtcaggagatcgagatcatcctggctaacacggtgaaatgccgtctctactaaaaatacaaaaaaattagccgggtgtggtggcgggcgcctgtagtcccagctgctcgggaggctgaggcaggagaatggcgtgaacccgggaggaggagcttgcagtgagccgaaatcgtgccactgcactccagcctgggcgacaaagtgagacttcatctcaaaaaaacaaaaacaaaaacaaaaaaacaaacaaacaaaaaaaaaacaagagaaaaagaaagaaaaggaaagacagaaagaaaacaaaaaggaaaaaagaaaagaaaaaagaaagaggtgaagttgaaatcattggctttccttgctgaactccaacctctctcgcaggctctggagattgtattccctggctccgcgcctctcctttgttttgatggcagtaagtcgcttggggggtcaggtctgtgtttggatattctggggccccagcactcaacagaagacctcagggaatatggaatggaaggaagaaaaaaaagagagggagggagggatgcagaaatgggtatgaaaatcgatgtgagtcatgggtgagcaagcgagtggataaattcatggacaagcaagggagttctcgcggactcctcacagccagcgtgtggcaggaattattattatcccaacattctccagaggaggaaacccaggctcagagtggtgagtgaggaatgaacgggtgagagtgtgagggagtccatggggtcaggccagtctctcagaggctttcaggacgaacagcactcacaccgccctgcgagcgcccattcctggaaacgaggtttcctcttgggtcccagcccttgcccacccccatcaaggagcatgggcccaggccaccggagctgctgaatatttatttggccccaggagcagtgcagggatgggctgtgttggaagagagaggagagcagacgaggatggctgattgtcaaagcagggggcaggacccgggggcaggagaaaccaggctgccttcccttcccggggtccctggggcatctgggtgtgtccgcgagggtcgggggagtgtgctggaaagttgtcgtgattggcatcgttgggggtgagaagacaggaatggttcagatggttggggtggaaggtggggggagggtaaccgtcagaggaagcttaagggtggggctggcttggctttggccggtctcgggagtctggggtcaggggctagagtccaggcttggccgggggcttggggtgggagtcagggcgcaggcagcagcctcactcggtccgggggccgcagcgagtgccactgggcaatgggccgccgcgggttggccagcatgtccgcccagtgccgcaggccagccccgccggcggccgcccccacggccaccctcccgatggcctcgttcttgcccagcttgtcgtagtccagcacggtcagctccacctgcaccttctggggtgggcgcgggaggaagaggagagaggagcgtgaggggaggaggccccggaaggggcggtgtccgttttcacggctgagggtacctctcgctgccacccgagggctcggggccccggagctcgggacgggggagggggtgggagacgagagggacggagcctgcggcgaggaggaggctctggcgcctttcttcctgcgcagccaggtttctaaggaaatgaaccctcaggactcggttgcggagcgggtgtgttcggcgcctcctgggggagcagcctcctaagagccgcaaagctgcagaactttaacaggggccgggctagggtaggcgccgtccctaaagaagtgaggggaggtctctttttcttagaaccacgttcctgaggagggcggggcatcctggtcctgcttagggtggggaatctggtcccgcttaggagtggggcatcctggtcccgcttgggggcggggcatcctggtcctgcttgggggcggggcatcctggtcctgcttgggggcggagcatcctggttccgcttggtggggcggggcatactgatcctgcttagggtggagcatctggtactgcttaggggtgggacatcccggtcccgcttagagcagataggacacccacacccaattttaaggagtctcttcctggagtggaagaggcttcctggtcctcataggaggaaacagactgagagcataacctcagaccccctcacctggtttctagggagatgctaaaaagtctccctccgcctagcaatggcgattactaaaggtctgggctcttggagaagggcaggtttgagctcacctggacttggtcacagggcacctcgaagctgaaagcttcgttgtaataggggttcagagtgttcttcttgatggtggttttcttcttccgcacctttttgccgccctgcagcaggtggaccttgacgtatggatctggggagaggaaggaggagtcttatagctccccactgctgggttgttggaccaacatagaaacactgcctacacccttcgggtctccctagctctatgccaaaatccatgccttccacagcagccaggtcctccctgtccccgaagaaaccctcgaggctcagaaactgtcagaacgagaacccaccccacgccatccccacacaccccactcccttgcttcccacacacctgacagtcctcctacgtccatcttcttcaggtttttagcctccaggacgatgacggtgagcttcccggccgtggggacatagcggagggagaagcagatgtccccaagcttctcctgctgaaaggagaggggcccatcaccagagccccggctccacatccatgcctcctcaggggtacaatccacgccgccctgagggtctggaaagcctatgatctgattggctcaggatgttgtgggcgggactgggcctgggggcgtggctcggggcgcgaccgcgcatgctcacctcctcccgcggagccgcctgcagctcccgccaggcctgcactggccgccccaggtccacggagctcatagggacccgcacctccccgatggcgtcattgcgagagaagcggtcgaagtcgtacaccgccatgaccagcaccctgccccccagctccacgtaggggacctggagtgcacagagaatccgcagtagagagcaggaagtcagagatagggtgaggcacagcacaaccagaaggaaggcatggagtgaggcagcgagggtcgaagcgaacagttgggggaactcaaatgggaaagtccagggatccatgcggaaaaaaatcacgggtcagtggaacccaaatcgtaccgcccaaggaccaggctacagcccaggagtcagtagtgcccagggtccagtggaatagccccagagctggtagctgccacctgagctgtggccgcctccaggaaaagcggaaggggtcggtccctagtgttccagggactgggcacaggctatggaacacggggcctgaaggcaggagctcaccttgaaggcgaaggtctccccaaagtgagggttcagcgtctgccgatgcaccttggtctcgtaccgcctccgtttgtccggcagcaggtagacccgcacataggggtccgaggagccaccaagatccaaggctgccaatcccattgcttgcagaatgcccaccagcagctgcagggcccaggcacagtgggggaggtggggaacactagtcttagcctcccttccatggctcctttcagaaggggttggaacccccgggatcctccctccaaagcttccccttcctccacacccacctggccactctggaagtcataatccagggagtactgcagtcgtcctagctcatgcttgtctgccacctgctgccctggcccggatggtgctggctccagctcctctacttctggctgcaccttaaggagccaggggtaagggtgggtgaagtcttcccctgatagcagtatccatcaggctcagaagccaagggaggctcacaggtcccttgggctatacctgagctctcacaggctaagcagattcagtatttgactagtgctgtctgccacaggcaggaaatagacgtggtaacacagatgcagtatgtttgtgaaggtttgattagtggtgtctgctatgggcaggaactagacatgtgcttgtcatgcttagattaaaacaagtgctgatagtgtcccattgcccacaggaataatgcaggttttatttcacatgctaatggatgtactggggtgctagtccaaactgccatgtttacttgtgatcttagcacagcaaaacatggaggagaaatggcatatttactgtgtacttgccattctaaagttgaatgaaaaagcagaaggtgtctccttaacctaggccagcaattcttaaaattcaatgtgaacctgaattcccctgaatcctgtggcaaaatgtctgaggtcacctcttcagggattctgacttgataggtcaggtgctagtgccagaatttgcatttcaacaagtacccagtgtgattctgctgcagacggtctttgaacatcactggtttaagggacagggatggggctggacaccaggaccctaaatagcatcctttacggatgctaattgaacagctccttattgagaaggaaggaggggaaataccaagttagtgaccacagacttgaggctcagagagggacagtgagttctccaaggtcacacaaccaggaaatggtccttcttggttggaaacctagggctgtctggctcccaggcaaccactgcactctgcactgagagacttaattttcagaccctgcagtgaccactttccattccaacggcctcatccaatgcaaatgtcttttatcctctccaggctgctgctgcactggcctcgtccctggatccctcgccgcagatctgtcctacacagggttccagaggagtcatcctaacaccatctgaccctgtccctctcatgctcaaaacatatttgtagccttcatcaccttcatgacatggatactgctgagttctccagacacttcactccagagtgcagctattgtgagaaatgactctttgttccccaaataagcctcagaatctggatatggggcctgaatctggatatggggcctcaacacatgctccaacttggactagaatgtccttctctctggtctcagttaactctgtccctcaggtctcagtgcagaagtcacctccaccacgaagcctcctctgtctgaccctctgttttaaactttttcctactgtaaatatgtcccattttctgaaaaaaatcagcatattttaaagtattctggcacaaagctggttttcagctttcagagccatttatttatttatctatttattggagacagagtctcgctctgtcacccaggctggagtgcagtggcgcgatcacagctcactgcagcctccacctcccggtttcagtgcctcagcctctcgagtagctgggattataccacaccaccatggctggcttttgtatttttagtagagacagggtttcatcatgttgcccaggctagtcttgaattcatgacctcaggcaatctgtccacctcagcctcccaagtgctaggattacaggcgtgagccaccgcacccggcccagagccaaatatttatatgtttctgtaggtttctatacagtgggatgccttttctgtgctcctatgagaccctgtagtatggcacatattaccctgtgtggtgagtgtctgtgtcagtgcctgactctcccaccagactgggaagttcttgggaatagcaactagttctgttccatctctgggtccccagagtccagttgagggctagacacacagggaggatgagccagtaaggtgggttcctataggacagaagggagcagggactgggaccagctgggccattgagaggagcagggtgcgggaaggggccaggtggaggggctgggctgggccacaccttgtctatgtaactctggcccagccccttcacttcctgaaggtggacctgggcttgggcctggctcttcttgcctgtccgcctccgacagctcttccggtagagacagaaacagcagctgaagatgaggaggcctgagaccagcacgatggtggccagggcccaggggggcactgcagaggggtggagacaacacacattgaggcctgggcagcacgcaggctgattcagtcctgattacacgtggaagctggaatgctggcctccttttccctccagccattttcattgcatttcttcctgtgtttttcttccacctaatgtggcctatagagagattcgatgccccaacccaggctgacaccatctggatttgcttgcttgttagttctgcctttccttacccgaccccgccccccatttctgctcaactcctgatgcttttacaagaagccctgctcctcatcgggcctgtttccttatctgtaaaagaagagctaggtggaccttccaattctaagatcccattccatgcaacaccccttgatccggtttcgatttttttttttttttttttttttttttttttgcaaatctgttccttccttttaccccatttcgttcgcattccagtccaggatgacgacccgggatcccagccggattttccagcccgcctgcccgagtacacccgtccgaatcccgcccctcggaatcctggccaggctttctctctgctcggccccccacccccgggtcttgctcacctgggccgtggctgatgcgactggagtcgggaggcgtgtcgggcgatggaggccccggggttgggggctccgggaacatggtggcggggtcctggagtcttttctgcagagacactcaagcaccctagtcccccattcccaccccagacgtcctttgagccccacgcacaacaaagaactccaactcccatgaggcctttgcgcgaacagccgcgcagaaaccggacagccaccgcgagtcatgctgggagttgtagtatcagcctccccgcacttgagagggggtgtccaggacctagttccatcctaaagggataccctcttcctccacggccccacaggcatcccgctgacttctgcctcgtcctcgcccctccgcagggtctgaaccggaagcgggcgaaggcagacgtgggaaccagcagaccgcgttgcccagagcaacagccgggctcctctcaagcggggtgagagcaaagctggttgcccgggcaacgggttgttgccaggacaacgggcggggctgacgcacagacgcggagtcccggcggggcaggctcgctccggggcccaccggtgcctgggaaccccccaatagcccgactgggatcctgaggtcccgcgaggtggggagcgggcagcctgtggtccgagcgcccacagccgactgctccctccgcacctggtcctgggagctgagacgcaggttccctcttccctctccccaattttgctggagggcgggtcgggggctgcccggtgcctgtgctgagccccctcatccttcttggcctgttggtctctccacgcatccgtgctgctctcgtgaccgcctcggtctccacgctgcctcttgaccccacataggcgtcttccctgtgtctgcctccccaacccgcctgtctctcttccctatcgcctggcctctgtctccagggtctctccctctcccctccgcctgcgccccactccccgccctcggctctttgtcttctccatacctgtctcgcgtccccagatccctgtctctccgcttcaggctgctgccctccctctggttgtctccccagtgccccagcccccactcgcacacccctttcctctagggatgcggatgcggatgggctgagggcgggggtcccagcagctcctacctgctcggcggctggacgggacactcccgggagacgccgaggcgccagccccgcccggaccccaccccctgcacgtgggcggtggcgctgtcccgggtgctgatcgcggagctctccggggcgggggagccgcggagcggagcaggatcccgtgcgcgcgtgtgtgcccgtgtgcgtgtgcgcgcgtgtgtggtgtgtattgtgtgtgcccgtatttggtctcgggtaggcggaaagccctgccccgcccctcctcccgcctccacccgggaacctcgatgacgcccacagatgtttatcctggtgctttagcattttctgccttctggtccagtcgttggccgtccagaccactccactcctcccgccccaacacacacgacacacaccctgtatagcccaaagaacggcatgccaggatactcagtcctaggacctaggagaccccagacccccattggagacccagactctgcagggttcagcatcaaagtccccagctatcagcccccagacatcgccctctaagttcccctaacaccagtcccaggaggcggccagtgcggtggctcatacctgtaacctcagcactttgggaggccgaagcaggaggaatgcttgagcccaggagctggagaccagcctgggcaacatagcaaaatcccgtctctacaaaaatgagccagcgtggtggtgcgcacttgtgatggcagctactctagaggctgaggtgggaagatcacctgggcccaggaggtcaaggctgcagtgagccactgcactccagtctgggcaacagagcaagaccatgtctcaaaaacaaaaacaaaaacagaacaaaacaacaacaacaacaacagagaagagtaaaagaaaagctcagaaggcaagtccccaagcacctagctccagcgagccctgtccatactgcccagaccctggacacagacgtctggacactgccttctctgagagactcaaccacccaaacctacattttttcatgtgcaaatgtgtgggtccctctagtcccctcctggacgttcgcctcgatccctagataccaggaacccatccctactcccaatccaatattatttccagacccagaaatccatgggacaactgtctctggggagaacagtgatttaataaattatgggatagaaggaaaaatacatgtggatggtggggtgcagagagaccttgggcacagggactccctccgaccccagattatagaagactgatttggtttctgaagtaaaatcaaggcaggatccttcctgcctttggtcctcaagtagccagaactccagacccaaattccttcctgcctcagaatccaggccccagcctgtttctttctgcatcctggaaagacctagggaatccaagctatcatccctctcctccttcagggaaccaggaatccagatccccagctcccataggactcatctgaagcccaccagaccactctctcctggggaaaccagagtttgggataccagccccctcctcccacagcacccaggagtctgggagcccagccctctgctcttccaggaatctgggctcaagtgggtgtccagagcttgaggatgcctgggctgccgacccagccccctcgtcacttagacctccaacttgtgggcctggatggcggccacgttctcgtagatgaggttttcgacatcctcatacgggacttccttctcggctggggcctgggctgactgttggaggaaccgcaggatgcactgatgcaggaatacgtactgagcctgggaagcaggcacgggagtgagaggcgtccccccaggtctgagctgcgtggagccccagggtccctcgtcccactgcctcccgtcctgtgttgctgagggactgcctcacctcagtctgcaccatcaacggccgactctctctcatcttccttacaaagctgaagggcccaaggagaccctcggactgcagctgccggagcaggacgtccagggcaatgagggttcctgtgcgacccacgccagcactaggcagaacaagggaagggtcagaccaaggggcaggagtgtgagggtccggggtcatggctgattggagggatctgtgtttgaatgatgacaataactatgcctgctcacacctgtaatcccagcactttgggaggctgaggccggtggatcacccaaggtcaggagttccagaccagcctggccaacctggcaaaaccgtctcttctaaaaatgcaaaaattagccgggtatggtggcgcatgcctgtaatcccagctacttgggaggctgaggcgaagaatcgcttgaacccaggaggtggaggttgcagtgagccaagatcacaccactgcactccagcctgggcgacaagagcaaaactcccatctcaaaaacaacaacaacaacaacaacaaaactgcctggagttccttccatctgttaggctctgttctaagtgcctgatgggccttcttcactcctcccaaacctaagaagtcggatgtactagctccattgtacaaatggggaaatggaggctgagtgaggtgaagtcccattccccaggccactcagctaataagtggcagagccggggttcaaatacaggaagaggaactctccagccaatcatttagtaattcctttaaacacaaaaattagtcttttgttttgtttgagacaggatctctctctgtcacgaaggctgaagtgcagtggcatgatctcggctcactgcacccttgacctcctgggctcaagtgatcctcctgtctcagcctcctgagtagcttggatcacaggcatgcaccactgcatctgactaacttattaactttttaatagagacggggtcttgccatgttgcccaggctggtctcaaactcctggactcaagtgatcctcccacctcagccccccaaagtgctgggattacagg[136 bp omitted]tggtgaaaccccgtctctactaaagtaccaaaaaaaaaaaaaaattacccgggtgtggtggcgggcgcctgtagtcccagctactcgagaggctgaggcaagggaatcacttgaacccgggaggcggagattgcagtgagccgagatcacatcactgcactcccagcctgggcgacagagcaagattccgtcc[135 bp omitted]catgaagaaacctcatctccactaaaaataccaaaattagccaggcggggtggcaggcacctgtattcccagctactcaagaggctgaggcaggagaattgcttgaacttgggaggtggaggttgcagtgagcggagatcgcaccgttgcactccagcctgggtgacatagcgagactctgtctccacaaaaaaaaatagctatttgaacgtgagcaatttgtcacactcacaacgctgtgcagcccccacctctatctacttgcaaaacactttcatcacccctaaagcagacaccacgcccattaggccgtctctccctattgcctgtcaccctccagggcctggaagctactaatctcttcagtgtctctgttgctttggctgatctagatatgcttctggatatgcacactaatggaatgatgtga[136 bp omitted]agaaaccccgtgtctactaaaaatacaaaattagccgggcgtggtggcacatgcctgtaatcccagctactcaggaggctgaggcaggagaattgcttgaacccaggaggcagaggttgcagtgagccgagatcatgccactgcactccagcctgggcaacaagagcgaaactctgcctccaaaataaacaaacaaataaataaataaaataaaataaaataaaatggggaggacacccttttgccatgagactgtcatgaggagcagtagaactgtgtaaatgttcactgtgactgaaaccagagccccagtctcaggggctgttactcttcctcatctccctaatagttaccgttaggtgaaatctgacctacgggacttcagcataaatatcaggaaagggtcaggtgcggtggctcacgcctgtcatctcagcactttgggaggcagaggcagacggatcacgaggtcaggagttcgagaccagcctggccaacatggtgaaaccccatctctactaaaaatacaaaaattagctgggtgtggtggtgagcagctgtaatcccagctactcgggaggctgagacaggagaattgcttgaactcgggaggcagaggttgcagtgagctgagattgcgccattgcactccaccctgggcgacagggagagactccatctcaaataaaataaaataaaataataaaataaaataaaataaataaaataaaataaatatcagggaagcagttgatgggggaggccctgcactccagcacagggaagtgtctccagtgtttctcagaatctgtggccacatccccatcctgtggcttcatcctttctcccttctcttctgcattcaaccttctctgcctttaccttttcatctttctttttttccttttttttttaatcgagacagagtcacccaggctggagtgcagtggtgcgacctcagctcactgcaacctctgcctcccgggttcaagtgattctcctgcctcagcctcctgagtagctgggattacaggtgcccgccacgacacccggctaatttttgtatgtttagtagagacaaggtttgtatgttggccaagctgttctcagactcctgaactcaagtgatccacccgccttggcctcccaaagtgctaggatttacaggcatgagccaccgctcctggcctgccttttcatctttcgttcccatcttttcatccttatcccctttcttttcttaatctgcttcacgcccccctttatcttccacatccacctcctccttctctccctcttcacctcccctgtacgttcccagggtcccgtctaacacaactgtctgagccccaagggagcggttctctcaagggagagggtcctgggctggtccccacctgcagtgcacaatgggtgggcctccctccatggtctgatccagccactgccgaagcatcctccagaaagccagcaaggtgtctggggaggagggaacgccgtgatccggccaggcctggtagtggaattggcgcacagacagtgtcttctgctcctccacctggaaggagggagcactcacaggctctggagatgaatgtagggaggacctggcttctagcaccaggagcgggttccctggggcacactgcagctcctcagaggagtgggtggaaggttggagttggtggagggtcctggatgcatggcatatgtcacaggggaaggctgagggccaggacggggctggacacacgcacctggaggagcagcagttcccgcaccgtccagttctccatcacttcctcacctaccagggttacccgcaggtgcccatgggtgcagggctgcgagtccagaggccagtaatgctcacacttcacctgggggaggaggaggggtcagagaacacaactcctcttacccaggtctgtggggtctgctttaggccccaaatgtgaaccagcagatgggctggggggagagtggggaacaggtctacactgaagacgcctggggttaccctggaggaatccgtaaggtctgggtgtggggtctacattggatgagtgttcggggcggggtcctgcacccagtcagcacccaggactcagatctctcacccggccggcctccatgcagttggtcagcatgaccagggtgtggctctgctgttcccacaccaggcgccagaagtcacccactgtctgtggcaggggaccctgggttgcaatgaactcctgggggctccagagaccctggttgaggaaggcaggcgggtcaggggggcctttagttgatccccgagctcttatctctccaggcgtgctgggcaccctttcaatcccaaccacgaccttacgggcatgaagctggcattgatgtagtcagagcctggctcctcatggatgggcttcaggggcacccgggaccagtcatctaggagaagaggccagcattagccaggcagagagacccagagaggcacagagacaagaccacaggcagagagacccagagaggcacagagacaagaccaagacccatggacaaaagtcatgccgagacgcaggcagaccttgggagctacacagggactgagaggggcggagggacctcagctgcagggagcaggccaggaggactctcaaagggacccacagccgggtgcagtgactcacacctgtaatcccagaactttgggaggctgaggtgggtggatcacctgaggtcaggaatttaagaccagcctggccaacatggtgaaacccggtcgccattaaaaatacaaaaattagccaggcatggtggcgggcgcctgtagtcccagctactagggaggctgaggcgggaggattgcttgaacccgagaggtggaggttgcagtgagcggaggtggtgccacttcactccagcctgggtgacagcaagactct[132 bp omitted]cctgtctctaccaaaaatacaaaaaattagccgggcgaggtggcgggcacctgtagtcccagctactcgggaggctgaggcaggagaatggcgtgaacccgggaggcggagcttgcagtgagccgagatcgcgccactgcactccagcctgggtgacagagcgagactccgtctcaaaaaaaaaaaaaaaagaaaaaaagaaaaaaaaaaaaggaagaaaaaaaaaaggagacccacggtagggggcaggacttgtttctcaaagcgggtaggagaaggggactggggtggggtgccgactagatcagggctgggacaaaagcagcaggaacccgagactcacagggcagcacatttctgtagcggttcttggcgttgttctctgaagccgaagccaccatctgagactggctgtggcccaccagggagagttgctggggatgcagggagagggggtacctggtgttggattttctctactttccctcgggggtacccccgagctccccttgccttcttcggcatcaccccttgtttattcgttgcaccctgagattatatggcacccacaaaaacagaatagatgtgtgtgccacctgccctgtggggcactggggaggatttagggaaccatgggacttcttcaggcaggcaagaaagcaggtgtcaggggagaaaggactcactgggtgggggcagagagagttactttaggactgacccaccattattttaagatttcagtgagtggaaagataacatggctgggaatctctgcacaatccaatgacatatgtgatgctacttttgcttaatcccgaaagccgtgaggtctggccagggggtggggggtgggggtctgggccaccggagggagactgagctcagcccctctgtcctctccccacctggtactcgtctgcaaaaccacagttgctgtccctctcattcttcctgacgtggtcagcgaagtcttcagctgggatgtcccctggggagctacgggttttgggggagcagg[154 bp omitted]tctactagaactacaaaaattagccgggcgtggtgttgcacgcctgtagtcccaactactcgggaggctgaggcagaagaatctcttgaacccgtgaggcagaggttgtggtgaaccgagatcgcaccactgcactccagcctgggtgaaagggcgagactccgtctcaaaaaataagaaataaaataaaataaaataaaaaataataaacatactcagacagccctacacttacacttctcatgcagaccagtttttttctccttcctgtcatcctatcaccatggcttggagtctatatccactactccagggaacacctttctccaaaatcgtcgtggcctccctgtctgtaattgcaaaggccacgtttcagcccccaccggcctgactgctcagcagcatttagcaccactgcctgtgcctgccttttctcctggatctgcactgttccggaacacccagccctggcttggcccccacctacccagctgctgcttgttcatttcctgggcaggcccctcctcctctgtccgtcttaaaaggtaactgttccccagtgtccaaccccaagccacttttcttgctggacgcacacttcttacagggtttggcccattcctgtagtttcactttctttctttttcttttccttttccgagaaagagtctcatcctgtcgcccaggttggagtgcagtggtgtgatctcagctcactgcaacctcagcctctggagctcaagtgattctcctgcctctgcctcctgcgtagctgggattacaggtgccagccaccatgcccggctaatttttgtatttttagtagaaacggggt[146 bp omitted]ttcttcctaaacatgttagactgtgtcactagcctattcaaaatctcccaagaactctcagctcacaataaatccaaagtcctaactttcaactacaggcctgtgcctgctgtggccccactgacgtctctctgacctcacttcccactgccctccccttcctcactctgctcagtcggagacgcacgatgttctctgaacctcacgtgtgctgttgcctcaggccctccacgcgcccatccctgtcctgggagcgcctttcccagatgcatgctcggctcctctcccacttgcgtaggcctgtactcagatgacttcctcttagtcatcttgttagcaaagctttccttgaatatcctgccgaaaatattcctgctgggtgcagcggctcacgcctgtgatgcaaacactttgggaggccgaggtggaagggctgcttggggccagaagttcaagaccagcctgggcaacctggtaagaccacccccccgacctccatctctacaaaaaattaaaaaattagccaggcattgtggtgcgtgcctgtggtcccagctactggggaggctgagatgggagggtcacttgagcccaggaggtcgaggctgcagtgagctatgattgcgccactgcactccagcctgggccacagagtgagaccctgtcttgacaaattaataaataaaataaaataaaataaaataattcatctgattttctctctaatttattctaattttcacattagaagaatatcaaaataggccaggggctgtggctcacgccggtaatcccagcactctgggaggccgaggcaggtggatcacaaggtcaggagttcaagaccagcctggccaacatagtgaaacactgtctctactaaaaaatacaaaaattagctgggcgtggtggtgcatgcctgtattcccagctactcgggaggctgaggcagtagaattgcttgaacccgggaggcggaggttgcggtgagccgagatcatgccactgcacttcagcctgggtgacagagcaagactccacctcaaaaaaaaaaaaaaagaatatcacaatattcctctacccttcctatcccctccttttgccttgtctccaagtttatttatatattttatatattataaatttatatattatatattatataatttatatattatattatatataatgtatattttatattgtataatatatataatatataatatattatatatataacatataatatattatatattataaatttatatattatatattatatatattataaattatatatatatataatttttttttgagacagagtctcactctgttgcccaggctggagtgcaatggtgcaatctcagctcactgcaacctctgctcccgggttcaagtgattctcctgccccagccacctgcgtagctgggattacaggcgtgagccaccatgcctggccctgtctgaaagtttatatcatattttttatgatcttttttaattttttattactattatttttttgagacggagtctcgatctgtcacccaggctgcagtgcagtggcgtgatctcaactcactgcaagctctacctcccaggttcacgccattctcctgcctcagcctcccaagtagctgggactataggtgcccgccaccaagcctggctaattttttgtattttttagtggagacagggtttcaccacgttagccaggatggtcttgatctcctgaccttgtggtctgcctgcctcagcttcccaaagtgctgggattacaggcatgagccaccgcacccagcaatcttgtttattgatatctcctgtactagaatataagcccctggcgggcaagaatcttggtttcatttgctgtttgtttggcacctggaacagtgcctgatacatgctggtgctcagctgatatctgctgaatgaatgaatgtccgggagttgagaccagaactgaattcgctggcccaggctgcttggggagtgagtcacgatggaagggccgtggtccctgtcgcagaggcatgggccccttctgagacctttgtgggtaaatgcattgatccaccctctgacctagctggcagccagcaaacaccccttgatttgaccagattctttccaatgcaccccccagaccttctgctcacctaaagaccagatccctgagttctggtttctgctgcttcttcttattcctgggaaaaggacgttaggatgagaggctcagggggtgaggctgcaaccagcggtcctcctccttcttctccagcccccaccctccaggcggtcagccctgtgctgagtctcacctcctcttcaggaagaaaatcagcaggcccacgaggatgagaaacaggaggatgcccacaaaggctccggcaatgacccctgtggggaggaggcatcgggaaccctcagagcgcaggtctgagctgctcatctgtctccaaccctgcccagcctttcctcttccccaggagcctggtccaaagacagctgacccccgaacatcacacggtgtgaattgcgtcggtccagttatacttacgcgcttacccatggattttcctccacccctgagacagcaagaccagcccctctcctacctcctcctcctcctccgcctactcaacgcgaagactacaaggaggaagacctttatgatgatctacttaataaatagcgagtacattttctcttccttaggatattcttagtaacatttttttctttagctacttgattataagaatacagcatatagtacggccgggcg[132 bp omitted]cgtggtggtgggcgcctgtagtcccagctactcgggaggctgaggcaggagaatggcgtgaacccgggaggtggagcttgcagtgagcccagatcacactactgcactccagcctgggtaacagagcaagactctgtctcaaaaacaaacaaacaaacaaaaagaatacagtatgtagtacatattacagatgaaatgtatgttgtttatgttattggtaaggcttccaatcaagagtaggctattagtagttaagttttgggggagtcaaaagttatgtgcagatttttttttctttttctttttctgagacagagtcttgctctgtcacccaggctgcagtgcagtggtgcgacctcggctcactgcaacctctgcctcccgggttcacgccattctcctgcctcagcctcctgagtagctgggactaccggtgcccgccaccactcctggctaattttttgtatttttagtagagttggggtttcaccgtgttagccagggtggtcctgatctcctgacctcgtgatccacctgcctcagcctcccaaagtgctgggattataggcatgagccaccatgcccggctgttatatgcagattttctactgtgtaggggacaattgttcaagggtcaactatccatcattttcacaggtgacctggttgctgaagagtgactcctggccaggcatggtggctcacccctgtaatcccaacactttgggaggctgaggtgggtggatcacttgagcccaggagtttgagaccagcctgggcaacataacaaaacccagtctctactaaaaaaacaaaagttagctgggtatggtggtgcacacctgtcatcccaactactcaggaggctgagcataagagtcacttgaacccgggaggtggaggctgcagtgagctgagattgcacgactgcactccagactgggtgatagagtgagactctgtctcaaaaaaaaaaaaaagaaaaagaaagcaaaacaaaacaaaaagaaccccaacaaaatagctgggcatggtagtacatgcctgtagtcccagctactcaggggactgaggcaggaggatcacttgagcctgggaggtggaggctgtggtgggcatgatcgtatcactgcactccagcctgggcaacagagtgagaccctgtctcaaaaaagaacaaaacgaaacaaaacaaaaaagtgattcttgccttccttagcttagactagtggttctcaacaagggtgattttgctcccaaagagacaccgggcaatgtctggagacgcttttggttgtcacagcttggaagtgggagtgctgctggcacatagtgggtgggaagcagaggtgcagctcaatatcctacaatgcgcaggacggcccccccacaacaaagaaggatctagccggaaacgtctgtagtgccgaggcgggggaaacactttgctggttgtgaaatcatccctggcatggacggcttctgttctccccagattgaggcttcatcttctcagaggtcctgctggctggggaaggactccccggcagcggagcctacccagatctggtggtgtcttttttttttttcttggtttgttttttgagacggagttttgctcttcttgcccaggccggagtgcaatggtgcaatcccggctcaccgcaacctccgcctcctgggttctagtgattctcttgcctcagcctcctgagtagttgggatgacagacacgcgccaccacgcccagctaattttttgtatttttagtagagacagggt[148 bp omitted]agttctcccaagatctgtcattagatgtctcgtcttagggtaggctcaagcctatggcccatcttcatcagccttgaaggcccccaagctgcagcttctcagcaatcctgggaagagtgtgtttgttgacagggaactgaagggtcttacaacctgtacgggagacttggcctcacagaatggacttggcctcacagaattggactagaggacctgttctctcagggatccttgttactaagggagagaactttctaagcaatggggtctggcaaagcccagttcaaacagcatccactggtcaccacatcaaccctcagtctctctccagattggagacccaatctcataagaaaccctattcctaggaagtgattgatggggcaaagtgaagcttatggccatggtcttggtacatggccaggtctttccaaagcttaagctccaaagtttttcaggtaccccattgattactgcaagatgatacaaccacattaggaaaaataaaacccggggtggggggtagttaaatgtatagttcccatgtgatccctcagttccactactgggtatagacccaagagaaataaaaacatacgtccacacaaaacctatccacaaacgttcctagcggcattacccataatggtcaaaagtggaactactcaactgacccatcaactggatcaatgaatggataaaaatgaatgggtaggccaggtgcggtggctcacacctgtaatcccaacactttgggaggaggagccaggaggattacttcaggtcaggagttcgagaccagtctgtccaacatggcaaaaccccatctctactaaaaaaatttaaaaattagctgggcatggtggctcatgcctgtaatccctgcacttcaggaggccgaggcgggtggatcaccggaggtcaggagtttgagaccagcctggccaacatagcaaaaccccatctctattaaaagtataaaagttagctgggcgtggtaggaggcgcctataatcccagctactcaggaggctgaggcaggagaatcgcttgaacccgggaggtggaggttgcagtgagccgagattgcaccactgcactccagcctgggcgacaagagtgaaactccgcctcaaaaaataaaaaataaaaaataaaaagttagccaagcatggtggcacatgcctgtgatcccagatacttgggtggctgaggcacaagaattgcttgaaccctggtagcagaggttgcagtgagcagagatcatgccactgcactccagcctgggtgacagagtgagtctcaaaacaaaaacaaaaacaaaaaaacaaattatgctcagtgaaagtggccagtcacaaagaaacacataatgtatgattgcattttttttgtttttgaaacagggtctcgttccttcacccaggctggagtgcagtggccccgatcatagttcactgcagtctcaacctcctgggctcaagtgatccttctgactcagcctcctgagtagctaggactacagacacacaccaccacagctggctaattttttaaaatgtagagatggggtctcactctgttgcccagactggtctcgaactcctgagctcaagtgatccttccacctcagcctcccaaagtgctgggattccaggcatgagccactgtgcccactctatgattgcattttaatgaaacgtcccagagaggcaaatctatagagattgaaagtggatgagagatttccgagggctgggggctggggaatgggagaactagggggtggtggctcagcggggtgagctttctgttgggggtaatgaaaatgttctaaaattgatagtgatgatggttgcacaatgttgtgaatataagaagagtcactgaattgtaactttaagtggtgagttgtggatggcgcggtggcccacacctgtaatcccagcactttgggagcctgaggcaggcagatcacctgaggtcaggagttcgagaccagcctggccgacatggtgaaactccatctctactaaaaatccaaaaattagccgggcgtggtggcacgtgcctgtagtcccagctactcaggaggctgaggcaggagaatcacttgaacccgggaggcagaggttgcaatgagccaagatcgtgccactgcactccagcctggacaagaagagcaaaactccatctcaaaatacaaaataaaaaagatgtttcaaaggaaatgagaaacaaaagagtcccactgatttcctcacaatggggcctgatggggtctaccgagaatttcatcatagctggctggcccgcgcggctccgctcacctgcactctcggtgtggcagaccacagagtgagacacgaccttcattccgtcccagatggtcgtgatggtggctgggtaggaccgagccggcccgagacccaacacagacacagcctccccacatgaagatctgtcctgggagccccgctgtcctcccacctccaactcaaaggcctcgtagcctccctgggggcaggaccagatcaagttgactccatagcccgctgaggtgctgacacaggaagtgatggtgactgtgtctgggtctgggtgaaggaagcaagaggtcagcagtgccatccaaggtggctttccaccccctccacccctacccccagttttctgagacgagcccatcccttcctcgccaaatccaaactacctcatcttccctccttttctgtcctccccgaatggacacaaataagtccttttaaactacaactcccatgaggccttgggctcctccatcactgcagctcatgaagtcatggcctgtggcctgatggaatttgtattccattcatctctcagctcgcaaggactgtgagctaagcccagttcaccacttgaaggcaggaaggggattctcacatgtggacgcacagaggctctgcgtggaactggctacgtcattcctctctgcccacacggtgaaattgtacaacgtcccgggttccagggcctccactttgtaccacgtctcattggtcctgctggtctggttgacccaattcgcttggggatcttgccccctccggggatgtcccttgctggcccactggacccagtatacgtacaactgagagtgggggtctccaggggccttccaccacagcatgactgagttcttagtctgagtttcattctggagatctgtgacctcattgggagctgagaagtgagaacagaggcctaagggggtatcctcgaagaccctcctaccccagcctgtctgcctctcccccacagcaaagctgagatatccattattgatggctccagtggctaaggaggctgaaccacaggaaagagtctagatacccaaagaccatggggaccagaatctcctagccctctccgtcccctggctacagccctgggtcccaccctgtcatctttctgttcttcccaaatgcacaccaattccacctactgaaactacagttcccatgaggctatggattctctgtatcgcttcagcttatgaagtcatggccccatggtgtgatgggatttgtagtcctccacctctcatggccctcgagatctgatctctgtattttctttcccacaggaaccccaggtagggtgtcttctcactctagacacaccacgtttgtagagggagctgataaatttcatctttttagcccaaatgaccaaggattaaagagttccaggttcaggccaggcatagtggctcactcctgtaatctcagtgctttgggaggccgaggcgggaggatcacttgagcccaagaattcgacaccagcttgggcaacataaggagaccctctctctacaaaaaatatttttttaaatgagctgggcatggtggcgcatgtttgtggtcccagctactcaggaggctgaggtgggagaatcagttgagcccaggaggtcgaggctgcagtaaccatgatcacactactgcactccagcctgggcaacagagcaagaccctgtcacacacacaaaaaagaatgaacctagtctccagagtgattttgatttttctcatgagtgggacccaccgtgcctaggctgagaggtggggccctctcgcttcatctaattccctgggaccagctgttggctattgtccagctggtgactttgtcagctcctgagaggtggtgctggacaattgagggctccccctgaccccaaagagtccatttcccaaagggagaaaaaacaggtcccacagcttggaaagccctgtctgctaagaaacgacacccactaggaacgggacctacaggtttaagctccggccggtgaggctggagaggcccatgggtactcttcatctcccaaggagctcccaaagtcctttcatctttttccttcccccatcctaatagggctgggttcagaaccgactgtgtctcaccagtggctgcagtgagggtgctgttatagcctctgacctcattcctctcggcccagacggtgaggtggtacaggctgccagcttccagttcctttagggtgatgtcagtacctgaggtgctttgggtcctggggtcagtcatgccttccctgacccatgagacccagtagctgtaggaagactggcctgggccctggggagctgtccagcgcaaagcaatggtgctgttggtccagtcctgcttgctgaggcttgtcactgcgttggggactgggagagggagcagagtcaggatttccacatcccctagtcctcaagagtccagaacacagtgatacgccctgtccttgtgcagcccagctcatccagaaacacttcctggcagggcacagtggctcaggcctgtaatcccagcattttgggaagctaaaccgggagggttgcctgagcctgggaatttgataccagcctgagcaaaatagtgagaccctatcgctactaaaaattaaaacaaattagctgggcatagtagcacatgcctgtagtcccagctactagggaggctgaggtgggaggatcgcttgagcttgggaggttcagtctgcagtgagctatgattgtgcctctgcactccagcctgggagacagagcaggaccgtctcaaaagaaagaaagagagagagaggccgggcgcagtggctcacgcctgtaatcccaacacttcgggaggccaaggtgggtgacttgaggccaggagttcaaggcaagcttgggcaacatggcaaaaccctgtctctactaaaaatacacagattagctgggtgtggtggtgcgtgcctgttgtcacagctacttggaaggcagaggcaggagaattgcttgagcccaggaggcagaggctgcagtgagctgagattgtgctattgcactccagcctgagtgacaaaggaaaactctgtctcaagaaagaagaaagaaaagaaggaaagaaagaaaagaaagaaggaaggaaggaaaagaaagaaagagaaaagagaaagaaagagagaaaggaagggagggaggaggggagggagaaaggaaggaaggagggaaggaaagagaaggaaagaaagagaaagagaaagaaagaaagagagagagacagaaaaaaagaaagaaagaaggaaagaaagagaaagagagaaaggaaggaacaaggagggaagggaggaaggaaggctttaaaggaaggaaagagaaggaaagaaagagagaaaggaaggaaagaaagaaaggaaagagagaaagcgagaaaggaaggaagaaaggaaggaaagggaaggaaggaaggggaagggaaggagaaagaaagaaagaaaaggcctgtgtccccacagccccacactcagcgggagaagtctggatgggctctcttcttcctcagggcagagccagcccccagctgtgattacatctgtcctgtggacttggagaggcagatgtctgcagagcctacggactacagagccagagcccagaagaggtgccacgccgctcctgctggttcttaacctctcaccaaaacagggagtggccgttgagggttcctacctgtggagatgctgacattctgcctggagccacgtgctccatttttttctgcccatacagagaatgtgtacaaggttccgggctcaagtctctcagctgtcacactggtatttgttgtgtttcgggtctctgtgccaccaccgtctccagtgtactctacccagtaggtgtagtcctgagggtatgggccatcggggacttcccagcatagggcgatggagctgttggtctgagtctccatatggaggtttctcactgggttgggggctgagaaagtaggaagaagatcctatgttgtcggagatacagaacagaacggggcaggagtgggcccctcactgccctcaaccatcttagctcttgttcaactgctggtgccagcagatgcagggtgtatgttctagaccgtgtttctcagactaatgtgccgggcgtggtggctcacgcctgtaatcccagcacttcgggaggctgaggcaaggggatcacctgaggtcaggagattgagaccatcctggctaacacggtgaaacctgtctctactaaaaatacaaaaaattagccgggcgtggtggctggtgcctgtagtcccagctactcgggaggc[133 bp omitted]aataaaaatctccaatggaatagcattaagaggtagggcccttgcaagattaggtcataaaggtgaagcctttatgcctggggttactgcctaagagaggcccaatggcccagcacagtttcacatttcatgtgagattacatgcctgtaatctcagcaatttgtggggctgaggtagggagattgcttgaggccaggagttagagaccagcctggaccacacagcaagacctcatctctaaaaaaaataaattagtcaggcatggtggcccacgcctgtagtccctgctacttgggaggctgaggtcggcggattgcttcagcccaggaatttgaggctgcagcgagctacgatcctgccactgcactccagcctggatgacaaagcgagactccagctctaaaaaaaagaaaaaaataagagagactcaagggagctttgtgtggtgatgaagacagtctctcactttccaatatggtaggcattagcaccgtggaggatgaaggggggactgggagcccctcaacaggccttttgagcacatgaaatgtgaaactgaatttgcagtttcatgcaactttaatgagtttaaatttaatagccacgtgtggctagtggctaccatattggacaatggaggtgtagacacagggagctgtccacatcagggtcatggagctgatgatctgagtttccatcctcaatatgtgacacagttgggaactagaagaagagtcagagggtcagagtgtccccactcacagtatctaattccttgaaagctcaggtaacatgccttggcccctacacattcctcttggtgcaggaaggtgccccttggcattatggtccacattctagagagtcctagacacagactggccccaacttagcagctggaggtaccatggacattcattccttcttcatctcctgagctgagactgccccaggatgtggacatgagtacctggctcaatatggcccagagggactatggaatagacaatcgtctacattctactgcttactgtcccttaaacaaataagagatcaaacaaatggcgactgcctctcacctgtggtggcatttcgagtctcccgggagctgttgattccattcttccccacccacacggaaaacacatacaaacacccgggttcaagtctatccacggtgatgttggtgtgtgctgtgcttcgagtccctgctctgccaccatctccagtgtactcaaccccgtaggtggagttctgtgggtctgggccatcggggacctcccaggtcagggcgatggagctgttggtctgagcctccactgtcaggtttctcactgggttgggagctgaaaaccagcacaggagggaaaatcagttgtagtttctggccctcaaactttccagcccttccttaaccattgcatccagcaggtggaggcagggaggcccagttctgcactgtccagtgtggcagccacgagttccacgtgagtgttgagcaccgtgaggtggcttttgtgaaatgagatgagccgttagtgtaagatccacaccggctttcgaagagttcgtatgaaattaagaattaagaatgtcaactatctgattgatcctatacacacacacacacacacatatatatacacatacacatatatatacacacacatatatatacatacacatatatatatatattttgtgggtatatactcagtgtgtatatttaatgatcctttccttatattgattacatgtcaaaatgataatattttgtatctgccaggcgcagtggctcacacctgtaatcccagcactttgggaggctgaggtaggcggatcacctgaggtcaggagctcaagaccagcctggccaacatggcgaaaccccgtctctactaaaaatacaaaagttagccaggtatggtggcatatgcctgtagtcccagctactcaggaggctgaggcaggagaatacttgaacccaggaggtggaggttgcagtgagtcaagatcatgccactacatt[139 bp omitted]ggtgaaacccgtctctactaaaaatacaaaaaattagccaggtgtggcgg[201 bp omitted]tttccttccttccttccttccttccttctttcttttttgagacagggtttctctctgttgcccaggctggagtgcagcagtccaatcagagctcactgcaacctctgcctcccgggctcaagcgatcctctcacctcagcctcccgagtaggtgggaccacgggaacacgccaccacagctacttttttattttttttgtagagacaggctgaccagtttctttgtacttatttttatgtggctgatagaaaattgaaattctcacctgtggcttccactgtgtttctattggactaaagaacctgtcacattttgtcagctcccaaccaccccctaccactgtccttataaaagaaataaaaataaaacagcggctgcctcttacctgtggcactagtgacaatctccacagagctatttactccgtctttctccacccacacagaacacgtatacaatgacccgggtccaaggccatccacggtgactctggtgtctgttgtgtttcgagtctctgttctgccaccatctccagtgcactgaacgcagtaggtcgagttctgtgggtctgtgccatcggggacctcccagctcagggagatggagctggtggtctgagcctccactctcaggttcctcactgggttgtgagctgagaaattaggaagaaagatctaatatgagcaggactacagaacataacgggggcagccagtgagctttttgtttgtttgttttttcgagacagagtctctgtctgtcatccaggctggagtgcagtggcacgatctcggctcaccacagcctccgccgtccgggttcaagcgattctcctgcctcagcctcccgagtaggtgggactacaggtctgcaccaccacacccggcttatttttatattttttcaccatgctggccaggctggtctcgaactcctgacctcaggtgatcctcccacctcggcctcccaaagtgctgggactacaggcgtgaggcaacatgcctggccaagtgggcatttttgatcatcagagttcctagttgtccctcaacagctggtgccagtagatgcagagtttatggtctagaccagggcttctcattctttgctgtgtgcacatctcacaggggaccttgtgaaatgcaggttctcactcagcagggctaggatggagctgagagactgcactcccccccaccctttttctcccccaccagtgtcacttgccaatgtatttccatcagctctcagagacccggatgctgcccacacatggaccacactttgagtaacaaagacctgagccagcgctttccaactgagcttctgcaacgatggaaatgctctcccaccttccagtatggtaggagaacagagaaggaaatggaagcccttcaacagggctttcaaacatatgaaatgtgaaactgaatttgcagtttcatgcaactttaacgagcttaaatttaatagccatgtgtggctggtggctaccatatcggacaatggagatctagccagagggagctctccacatcaggatcatggagctgatgatctgagtttccatcctcaatatgtgacgcagctggggactagaagaagagtcagagggtcagagtgtccccactcacagtatctaattccttgaaagctcaggtaacatgccttggcccctacacattcctcttggtgcaggaaggtacattctagagagtcctagacacagaccggccccagcttagcagctggaggtaccatggacattcattccttcttcatctcctgagctgagactgccccaggatgtggacatgagtacctggctcaatgtggcccagagggactatggaatagaaatccgctacgttctcctgcctactgccccttaaacaagtaagagcaaaacaaatggcgactgcctctcacctgtggtggcatttcgagtctcccgggagctgttgattccattctttcccacccacatggaaaacgcatacaaacacccgggttcaagtccatccacggtgatgttagtgtgtgctgtgcttcgagtccctgctctgccaccatctccagtgtactcaaccccgtaggtggagttctgtgggtctgggccgtcggggacctcccaggtcagggcgatggagctgttggtctgagcctccactctcaggttcctcactgggttgggagctgaaaaccagcacaggagggaaaatcagttgtagtttctggccctcaaactttccagcccttccttaaccgttgcatccagcaggtagaggcagggaggcccagctctgcactgtccagtgtggcagccacgagttccacgtgagtgttgagcaccgtgaggtggcttttgtgaaatgagatgagccgttagtggaagatccacaccggctttcgaagagttcgtatgaaattaagaatgtcaactgtctcattgatcctttatatatatttgtgtgtgtgtgagtatatacttggtgtatatattgaatgatcgtttttatattgattacaagtcaaaatgaaaataccttgtatctgccaggtgcagtggctcacacctgtaatccccgcactttgggaggccgaggcaggcggatcacctgaggtcaggagttcgagaccagcctggccaacatggcgaaacccagtctctactaaaaatacaaaagttagttgggcatggtggcacatgcctgtagtctctgctactcgggaggctgaggcaggagaatcacttgaacccaggaggcaaaggttgcagtgaaccaagatcatgccactgcactccaacctgggcgacagagcaagactctgcctcaaaaaaaaaaaaaattgtatctgatggactacataaaatctctcatagtaatttagtttgtttttcttttcttttgttttcttttgttttcttttctttttttttttttgagacagggtttctctctgttgcccaggctggagtgcagcggtccaatcagagctcactgcaacctctgcctcccgggctcaagcgatcctctcacctcagcctcccgagtagatgggaccacgggaacacgccaccacagctactttttaatttttttgtagagacaggctgaccagtttctttttacttatttttatgtggctgatagaaaattgaaattctcacgtgtggcttccactgtgtttctatccaactaaagaacctgtcgcattttgtcagctctcaaccaccccctaccactgtccttataaaagaaataaaaataaagcagtggctgcctcttacctgtggcagtagtgacagtccccacagagctatttactccgtctttctccacccacacagaacacgtatacaatgacccgggtccaaggccatccacggtgacgttggtggctgttgtgtttcgagtctctgttgtgccgccgtctccagtacactgaacccagtagttggagttctgtgagtctaggccatcggggacctcccagctcagggagatggagctggtggtctgagtctccactgtcaggttcctccctgggttgggggctgagaattgggaaggaaggtctgacaaaaagggaaccaggtcagtacaatccctcccaacccctgagctcacgccccaagtccagaaacaacggcgctcataaacccctaccatggaccactggaccccacggggaccccccagaggctcacggcagttgcggtcccacctcttcgagtgggcagtgagttcaggcaggggtcactcaccaggcgccctggcccctgtccagctgcacaggccctggagggaacccagagaaaacggagtcagcctctcaaccactcctccgcccagtgaggccgaggggctgggaggagcggctggtccccgccccatgagtcacccttgcatgggaaggaggggccggtgttaggctgggctgtcacgacctcgaccgtctttcctgggtcgaggagagaagggggagcatggcaggagcagagcttagggagctggggttggctccacccgataaggctgagagataaaattaatgatttcatttcctgaaatatatgtccttggaaaaccgagggcagagagcaatgaacagactgggaagggagaaaaaaaccaaggttggggatcaggaaccttggcctgagggtggagggcctgggggcctgggggcctgggtctgagggaggaggggctgggggtctcgacctctggtttgagggaggagaggttgggggcctggactcctgagtctgagggaggaggggctggggtctggactcctgggtctgagggaggaggggctgggggtctcgacctctggtttgagggaggagaggttgggggcctggactcctgagtctgagggaggaggggctgggggtctggattcctgggtctgagggaggaggggctgggggtctcgacctctggtttgagggaggagaggttgggggcctggactcctgagtctgagggaggaggggctggggtctggactcctgggtctgagggagtaggggctgggggtctggattcctgggtctgagggaggaggggctgggggtctggactcctgggtctgagggaggaggggctgggggtctcgacctctggtttgagggaggagaggttgggggcctggactcctgagtctgagggaggaggggctggggtctggactcctgggtctgagggaggagggcctgggggcctgggggcctgggtctgagggaggaggggctgggggtctcgacctctggtttgagggaggagaggttgggggcctggactcctgagtctgagggaggaggggctggggtctggactcctgggtctgagggaggaggggctgggggtctggattcctgggtctgagggaggaggggctgggggtctggactcctgggtctgagggaggaggggctgggggtctcgacctctggtttgagggaggagaggttgggggcctggactcctgagtctgagggaggaggggctggggtctggactcctgggtctgagggaggaggggctgggggtctggactcctgggcctgaaggaggagggactgggggtctggacccctgagtctgagggaagaggggctgggggtctggactcctgagtctgagggaggaggggttgggggcctggactcttggtttgagggaggaagggctgggggcctggactcccgggtctgagggaggaggggctggggtctggactcctgggtctgagggaggaggggctgggggcctggactcctgagtctgagggaggaggggctggggtctggactcctgggtctgagggaggaggggctgggggtctggactcctgggcctgaaggaggagggactgggggtctggacccctgagtctgagggaagaggggctgggggtctggactcctgagtctgagggaggaggggttgggggcctggactcttggtttgagggaggaagggctgggggcctggactcccgggtctgagggaggaggggctggggtctggactcctgggtctgagggaggaggggctgggggcctggactcctgggtctgagggaggaggggctggggtctggactcttggtttgagggaggaggggctgcttcctgtccgtgagcacagctgtgtgttgcctgaagccagtgtcccccgcagcagacacgacagtgtctaagggcccgggtgaagctggtgtcccccacaacagacacgacaatgtctaagggcccgggtgaagctggtgtcccccgcagcagacacgacagtatctaagagcccaggtgtaagactctcctacagtctctgccaagcctgaagccctcttccttctccaggggatcttcagcacctacttcctcaagatcgaggtgcaggcacccagctccttctccctcagacctgggagtccctgccttgggagcccgctctgggcggggagcacttaccagcagcaccaggttcccccagaccccgaggcccccgccagccccagccatgcctccagacactgccggggacccaggagtcccaggcctagtccttccacctgctggactttacactcaagaatttcccctttaccagatcattggtgaagccagaggccagggcgggaaggggaggaggaggaagtggaacccagctcccaaccctgccccgctggccctcaccttcctccctcaccgctgcctctagctctgacactggagatgcctcccatcctttctccagcccccagcccactccactttgtcccccgaaatctccctctgcaccccaggtaccgggtgccgcgccccactgctgcacggatgcgggacgtggggcagaggatgagagcagggggtgctgagagaaaggccagctgactccctcgcctccctggtgggtgatcacacatcaagagcagcctggggcttagacctcatgcccctcgtccctggagcacgctcttccattcagcctctgacgcctttcccctctccgtctcccacaagcccctgcagctctcacaaaatgagcccagcgggctcctgcctcttggcctttgcctagactgtctcccccaccagatgcacctgcctactttccccctaacagtctcctacccactgctccattaggattcagcttggaaatgacccatgccgggcctggggcctttctagcctggtcaggaccctgtgcactgtcttccacaccccagactctctaatttgcatatccatctgtgaccctgagcaaatgacttaaatccacagtgactcagattcctcatctctaaagaatgggcacccttgtaaatatgctaagagaaatagatgagttactacgtggaaagtcttggaacaatgcctggcccattttaaacagttgataaatattagtcatgtttatttttagttcatccctaggccacctgtgctcagaaggggcctgacacccagggcttttcaaggtgtttttgttgacttactatgtgcacacgtggactgccttcatctcacatatagtgcggaaatgaagaatagaaaccccagccgggcatattggtgtgtgcccagctactcaggaggctgaagtgggaggatcacttgagcccaggagtttgagaccagcccgggcaatatacaaaaccccatctttacaaagaaaaacaaaaagagagaaaaaattacccaggcatggtagtgcacgcctgtagtcccagctaccgggaggctgaggtgggaggatcacctgagactgggaagtcaaggctgcagtaagctgcgattgtgccactgcactccagcctgggtgacagagtgagcccctgtctcagaaagcaaaacaatggccaggcgcggtggctcacacctgtaatcccagcaatttgggaggccgaggtgggcagatcacctgagatcaggagttcgagaccagcctggctaagatggtgaaaccccatctctactaaaatgcaaaaattagctggctgtggtggcaggcacctgtactcccagctactcaggaggctgaggcaggagaatggtgtgaacctgggaggcggagcttgcagtgagtcaagatagcgccactgcactccagcctgggtgacagagcaagactctttctcaaagaaaaaaaaaaaaaaaaaaaaagcaaacaaaacagctgagcatggttactcacgcctataatcccagcactttgggaggctgagacgagaggattccttgagcccaggagttcaagaccagcctgggcaacatagggagatcccgtctctataaaaagtagaagtaaattagccaggcatggtggtgcacacctgtggtcccagctactcaggaggctgaagagggaagatcagttgagcccaagaggtggaggctgcagtgagctgtgattgcaccactgcactccagctggggtgacagagggagactctgtctcaaaattaacaaataaataaataagttctcacaccaccactttgagaagtcagtttctctgtctctgagagcctcagtttccccatctgtatacacaaaggtttggttgcgagaagtttcctttcagtgggcaccggatgtaattcatgccaatcacttgcttgggtttctgttttaacctttctctgtttctcgtctatatcttaaaaaaaattttttttttattgagacagggtcttgctttgttgcccaggctggtctcgaactcctagactcaagtgatcctcctaccttggcctcccaaagttctaggattataggcatgagccaccacacccagctgtctcccctatactttttgatgtctctctctctctcctggtcctcctcctcctcctcactgtctcttccctctatctctcttccctcccatctagatccccaacttataaacatgctcaccctccctgtctataaaaaaatgcatcacttacattgactccacacccaccgtcctaccacaccctacttgctttctcttcaaaacccaactcctcggccgggcatggtggctcacgcctgtaatcccagcactatgggagcccgaggcaggtggatgacctcaggcaggaggtcaggagttcaagaccagcctggccaacatggtggccatctgtactaaaaatacaaaaattagccgggcatggtggtgcatgcctgtaatcacagctactcaggaggctgaggcaggagaatcgcttgaacccaggaggggacactgcagtgagccgagatcgcaccactgcactctagcctgggtgacagagggatactccatctcaaaaaacaaaaagaaacaataaaaaaatcaaccactccacaaaatgacccacattccccagcttccaaagtcctcctggagcagctgcctgtgtatggggaaggcaaaccaaaaacaaaacctgtaggacctcggactcgggccctccaactccagtccctccttcagatgaatgcagccccagccaacatcttagcagcaacctcaggagagactcggccgtgctcctcttttccccttaagaacagaaatttccacggagccactaatgagagtcccattagcacgaccctcatcacctgagttcttttcaattcctcttacctgtgtgatgagaagcaccaagagagcgttgcttggtgtatgtaatgataccatctctaggtctggtgagcaggaaccagagtcaccacagtggggcagcagagggcctgggctcaggtttcccagaagcagagcctgaggcagggattcagatgctcatgaactgtttgagggtttgctttcagaagacagagagtgatgaaagcagtatggggcagaggaaggagccaagtgaggctatcacttcagagggatcccatcacagagacaggatctgaacttttaacctctaatctttgtctatgggcttctccaggggtgagagtttcatgactttcctagtaaaacacgttcctctcaggtcaagagcaagttttttgttttttttgttttgttttgttttcagatgaaatctcgctctcactctgtcacccaggctgaagtgcagtggcaccatcttgcctcactgcaacctccacctcccgggttaaaggattctcctgcctcagcctcccgagtagctgggattacaggcgcctgccatcacacccagctactttttgttgttgttgttgttgtttgtttgtttgtttgagacagagtctggctctgttgcccaggctggagtgcagtggctcgatctcagctcactgtaagctctgcctcccgggttcacgccattctcccgcctcagcctccgaagtagctgggactacaggtgcccgccaacatgcccagctaattttttatattttttggtagagatggtgtttcacc[137 bp omitted]tggccaggctggtctcgaactcctgacctcgtgtgatccgcctgccttggcatcccaaagtactgggattacaggtgtgagccactgcgcccagccaagaccaagtctcttgagaatgtggcatctgcaagcagccaacactgcttaagaatgagtgctcagtgcctgcaaaggagatctgggtgaagcaccagcgacgtccacccctaaagcctcacacctgttaccagtcctgagccagttctcagtcttggaaccccttccatgtagcggatgcttttccctcagggaggactcaccgatactagtcaaagtacatactgtaaaccttcctcccagtttctcctaaaggccaatatccatggtcgctggggattagagaaagagaaaaggctactggactctgactctgaatcaatcctaatttggaggcacacacaggtcaccgtgaatcatggtctgactggtgtgcttggggctgtcaggtaacgaacggagggttcacctaaagaccatcacacagtgggtcaacgggactctaaagaccctgtgtggctccttcctcaggccttgagagtgaagttgaaatcgacattctcataaaatggcagacacaatgctttggcttccctgatctgtagtgtgaaagctttgatggtgggaagaagaaatggaagcccctagaaattcccccatctatattgggccagtctttcattgctataaagaaatacctgagactgggtaatttataaagaaaagagttttaattggctcgcggctctgcaggttgtacaggaagcgtggtgctggcatctgctcagcttctgggaaggcctcagggagcttttccactcatggcggaaggtgaagagggagcaggcacataacatgtcgaaagcaggagcaagagagagaggacgggaggtgccacacacttctatttttttattttattattattaaatttttgagatggagtttccctctgtcacccaggctggagtgcagtgacaccattttggctcactgcaaccttcacctcctgggttcaactcccagctagtttttgtatttttagtagagatagggttttgccatgttgtccgggctggtctcaaactcctgacctcaggcgatccaatgcacctcggcctcccaaagtgctgagattacaggtgtgagccaccgcgcccggccttgccacgtactgtaaaatacccagatctcttgtgagctcactcatcaccatggggatggtactaaaccattcatgaggggtccatccccaagatcctaacacctcccaccaagtccggcctccaacactggggattccatttcaacatgagatttggtggggacacagatccaaaccatagtatcatccttcccaaacagtcaacccagggaatcacagagatcagcgccagcatcaagccttggaaaacacaggggtgggatatgggagggtgattcctaaacattatcctttgattcacatgattaatctatgcaggagcttatggatcttggaagacagaagtaagaaatggtgatactggccgggctcagtggctcacggctgtgatcccagca[231 bp omitted]tcaaaaaaaaaaaaaaaaaaatggtgataccctcggaagtggctggtcttctcagggtaaggtctccttcagcaaatcagcacagcccctggcacctgatattcagctaatgaactggaaaaggcgttttgcctatagaagttagcctgaatgaagagtgttctttactccaacagtgacagaaggtcagtgtgattccctttagactgtctgggacctcggtcatcttatcaacccataagacatcacgctgttccccctcactcctggatagcaatttatcctcactggaatggacacttacaggtgtttattaatttctcagtgatttgttgaatgaatgaaggaatgaatgaatgaatgatgtctttaccttgagattggagttctttcagatttgctctctgcccacctcaccagcctcttctcctatctttactccagctacacagatgtccgtgcatgtttttcttagcactccaggtggattcaaacctcagggcctttgcacacactgttccctctgcctggtaaaatatttctccaccagccagggcctacttctctttctacttctggttgaccccagatacagttggccactccctcctatgtttggagccaaactaaacaaatctcttattataatactcatcacattgtctgtggctttgcctatttttcctttcttttatcagagtggaagaagcttctttgggtagagacaagtctattcatcttgggggacatcaggccaactccacaccgaaggctgatgaaacttcaggcaatatcccttcatctgaatctgatgacgtgtgtcacgttttccaggtccacactcagggatctggtctgcgttttcatgtaagctttctccactctcactttccctggactctcatccaggattagatttttttttttcttttaaatggaatctcattctgtcacccaggctggagtgcagtggcaccgtctcggctcactgcaacctctgcctcctgggttcaagcgattctcctgccttggccaccacgcctggctaatttttgtatttttagtagagacgaggttttgccatgttgactacgctgttctcgaactcctgacttcatgtgatccacccgcgtcagcctcccaaactgctgggattacaagcatgagccaccacgcctgccgcgattagatcattgatctcattgcaggtgaaccagtccagacccccatccaggttttccagcttgctcgctcctcacgctgtggctgtgtcctgtgttgccgtgtttccgctgaatccagcccttgttttcgctcttcctggccttgcgggcagccaggattgaaagatccaggaagtgacaggggcctgactcatcaacttgtaagagagctggggttctcctagatccatgctcgcactgaggtgagaaatgagaagccagggccgggagcctcctgggggttggctgccaacgccaggcaggcggggaatggtgattttcgcttgtatcgtggaggatgccacgcacagacgtgaatagaaagagcctggaccgtgtcctgaggtcagcgactgaggtcctgggtggggccagccaggacctgcccgggggctactgccctctgaatcaatacctccagggaccctacgttgacacccatggcctcccactctccacccctcagtcctgcgtgcggcacgtagtgctcactgggcgtctgtgtagggggttgaaggctgaggctggaacaagggcgtggcggtcgcaggctccagggcacgacggtccttcctcttccccttctcagccacatctggggctccgtccctgcagccaaggctccctggcgctgtccttggtgctgacgcggttctggaagtgcggtgccagggtggctggtgcggctcccgatggaaaagccccaccaaccccacaaagcagactcgggagagaacacgccaccgtctttagcgaatcttaccaacccagggccaaagcgccctgcaccccagagcagcactcgtggtgggaacacaggctgatgtaataaacagaaaagtgactgcgggggatggggaaggcgggatgtccttagcgtcccatggaaaaaacatatttcctccagatg[156 bp omitted]cgtctctactaaaaagacaaaaattagccaggcgtggtggcaggctcctgtaatcccagctactcgggaggctgaggc[137 bp omitted]tgagaaaattccatcccccattgttcggaacccaggaatctgggcgctgtgtggttttccataaaaactggtatattcgtttgctagggctactacaacaaagagcatagactaggtgacccaaacagcagagatttgttttcccaccgttctggaggctggaggtccaagatgaaaatgtgggcagggttggttcctcctgaggcctctttctccttggcttgcaaatggccgtgttctcccttgtcctccatgtgtctgtgtcctaacctcctcttctgataaggacaccagtcaggttggattatggcccaccttagtgtgacttttttttttttttttttgagacagcatctcactctgtctcccaggctggagtgcagtggtacgaacacagctcactgcagcctctacatcctgggctcaagtgatcctcccacctcagcctcctgagtagctgggactacagtggcacatcaccatgcctggcttacatatatatatatatatatatatatatatatatatatatatatatatatatataatgtatatatatataaaatgtatatatatgtgtatatatatataatgtatatatatgtgtgtatatataatgtatatatatataatgtgtatatatataatgtatatatatataatgtgtatatatataatgtatatatatataatgtgtatatatataatgtatatatatataatgtgtatatatatataatgtatatatatataatgtgtatatatatataatgtatatatatatttatttatttattttagaccgagtcttgctctgttgccaaggctggagtgcagtcccgcgatctcggctcactgcaacctctgcctaccaggttcaagcgattctcctgcctcagcctcctgagtaggtgggattacaggtgcccaccaccatacccggctattttttttttttttttgagacagagttttgctcgtcgcccaggctggagtgcaatggcatgatctcagctcactgcaacctctgcctcccgtattcaagagattctcctgcctcagcctcctgagtagctgggattacaggtgcctgccaccacacccacctaatttttttgtatttttagttgagatggggtttcaccatgttggcc[131 bp omitted]ttggccaggctggtcttgaactcctgacctcaagtgatccacctgcctctgcgtctcaaagtgctgggattacagccgtgagccaccatgcccagcttggctaattaaaaaaaaatctggggagatggggttctcaccgtgctgcccaggaagatttcaaactcctgggctcaagcaatccatctgcctcagcatctcaaagtgacctcattttatcttaatcacctcttcaaagaccctgtctccaaatacaatcacattctgaggtactggaggttgggacgccaacttacaaatttttgaaggaggatgaaattcagttcataatagcagggatgagctttatgccccctgaaaaagacatacttccccaggtagattcatctgttagtgttttttgttttgttttagacaaagtcccactctgtcacccaggctgcagtgcaatggcacgatcttggctcactgcaacctccacctcccggattcaagcgattatcctgcctcaccctcctgagtagctgggattactggcgcccaccaccatgcccagctaatttttgtattttcagtagagatggggtttcgccatatgggccaggctggtctggaactcctgacctcaagtgatccacctgtcttggcctcccaaagtgctttcttttttcttttttctctttttttttttttttg[216 bp omitted]agcctcctgaagtgctgggattacaggcatgagccaccgcacccggccccaaagtgctttcaaagtattgattcaaaactatggcacaatcccaaccccacccccactgctcagaacccagggagcattgggtttggtagattccttcttccacacccagaataaattttctcagctccattccccaaatgatgctgacttgaggcaggggaagaatgctttggtagctcaggggaaaggactgtggagttcctgtctttccctcttccaagatccaagggtgctagcgacctttctgtgttcatggtcagaagcaaggagggagaaagaccaggaaccacacagctctttgtcatctcacaggcaggaagcatccaacagaggccagctctggggggcatgctgggccacatcatttttgccagtgtcctggaataaggaagtgtaggatagtgaggaaggcagaccgtggggctcctccctaccatgctcatcagggcatccaggtgagggatgaagctgtcctaaagtctttccagaactcacacacacgtgtccccacctctcccctccttgatcatgtctccattttacgtatttactgatcatcttctgctattgttaaagtctaagctgaggggtgaaaccacagcagaaagcaaggaaggctcgaccccagatcacacagggagaggtggacagacagcatggctccgcccatttgcagccatttctgggcctgtaggctctggcagctcctgggattgctgtcctcggtgctgaatacgcgtttgttgggggcacacctgacaagtttgtcattttcagggaaaacccagtctctctcggcgctgaggagaaaacatggcacagcccttctcagtcctctagcaaccctggactctgcaggagaaaagagagattccctacatttgtttctatgagagaagggaaggctggagcaggggagtgggggaaatctctgcagtcctctcggaaagcaaacccttctacacctgtgatcccatgtgatttagcagagccctgagttaaaactaggccatgatgacacttggtgacacaaacatctgacaaaagagctgtaccctttatattttcaaagactttctacaaattaaggaaggcagaagacccatttaatgggcaatggacttgaagagacactttaccaagaatatccaaatggccacaaacacacacacatacacacaaatgggaatgtgttcaacttcattagtcattatggaaattaaaccacaaggaagcaccagaacactgcagcagaagaactaaaatggaaaagacgaacaaccaactatctgcaagaatatggggcaaatgaagcttcctcacattgctggcaggatggtaaactggtaagctgctttgagaaatggtttgtcagtaactacgaaagcctaaggtacgtataccatcactcagcgattccactgctaggcagacatctgagggaaaaaacttcctgtgtgctccaaaagacatggacagaaatgttcatggtagcttcattcatagtatcccaaaactagaaacataaaatgttcatgaagggagggatgaaacaataagttgtaatacattcatgcgataaatagtacacagcaataaaaataaaaacacccagcatggatccacatttcatccacaatgttgagtgaagaaagccagaatcaaataactacatactgtataattccacttagagaagtttcaaggacagactacactaatttacgatgataaagatcaggagactggtcactcttggggaagggaggtacaaactggaggggagacaggagaacctgctaagatgcagaaaatttatttttttttaattttatttttgagatggagtttcgctcttgttgcccaggctggagtgcaatggtgcgatctcagctcaccacaacctccggctcctgggttcaagcaattctacaggcatgcaccaccacacccggctagttttgtatttttagtagagacggggtttctcc[143 bp omitted]gagtgcaatggcacgatctaggctcactgcaacctccacttcccgaattcaagcgattctcctgcctcaggctcccgagtagctgggattacagtcatgtgccaccatgcctgatttttgtatttttagtagagacagggtttcacc[139 bp omitted]gagcacagtggtgcgatcctgactcactgcaacctccacctcccgggttcaagtgattctcctgcctcagcctcctgagtagctaggattacaggcatgcaccaccacgcccaggtaattttcttgtatttttggtagagacagggtttcatcgtattggccaggctggtctcgagctcctgacctcaggtgatccacccgcctcagcctcccaaagtgcagggatttcaggcatgagccacctcgcctttcagcccacacaatgaaggtttatgaagccccagattccagggcctccaccacaaccccatctctgccacacttctggtcccactgggggccgtggtccctgcccactggacccagtaggtgtaggtgtgggggtctgggccccggggggatatacaccttagtgtaacagaactcagggtctgagcctgtatcctcagatccatgacctggccgggtaaggaaaggaagggaagggggtcagggttcctgcaggaaggttatctgagtggccttaaacagacccagttgtctcttacttgtagttctcaagagtaacagtagaatgtgctgggaatgcaacatccggagatatggagggactggccaggcggcctgggctccattcctgcctgccctagaaacaggatgcccttcaatgcttgagcccggtgactcaggtttcccccagagtagaaaacccagggctgggtactttttggggtccctcagctgccatacaagtgaggcacacacagttgtgaccctatcctccctaggccactttcctaagccttgggggaccagcttacaacggaccctgggattctgctgtcccttgctgcccatctgtgagaaacaagcccacttcatgtaactttttgcgtgtggcgttctgtctcatcactctggcaagttggtaaccagtgcacagtgaacctgcttcacagaccacaccccatagtccctgggcctccagagcaaagggaagcatcccctccttcccacagccctgcttgctctggaaggatgcaccctatcagtggggccgatgccagaggcctcctgaggcctcctactccccaagcccagagtgctctcacccctcgcccgtggcctctgtgagcgtctggctggggctgttgacctcatgcttctgggcccacatgctggggtactgcgtccctgcagccaggccctccacaggcaccctgatgtctgaggagtcactggcccagcagagccagtaggggcaggtcttggagtctgggcctgcggggccctcagggtgagggagctggtggtctgagccggtgtgaccaggccagggactagtttgggaatgtggaaaggagagagtcatttgataaagtttgtttgtggctctaatgagaataaagtgcacagcctggcactttttacaaatgtgcacacgcacgcacgcgcacacacacgcaaacacacatgcacacacaagtgcacgtgcacacacacgcacatgttgctgggcagtggaaaggtggcccctcttacctgtagacatgctcaggacgtccctggggccacctactcctttcttcttggcccacacagaggtggtgtagagggtcccaggctgaagccctccaccacgagccagcagtgtgacgtgcttgtgttcccgctggccatgcccctggacccagtagatggaagtctgccggtctgggcccttggggctgcccagctcagggtgatggagctggaggtccgagcctccacactcacgattctgtctgctttggcggctgacatgggtagaagcctctgcggcaaacagaagacggaatcccacggcccttcctagacgtgcaggatggaggctgatggggtcactaacctgctgctgtggcctctgtcgtggtcccgagggcctggggagggcccagatggggaatcagacccacggtggtctgacctgcaggatcgggatgaaggctgctgagtcccaccccgcctcatccccaccagccaccccggcttgggagggaagatggagccggcgttttgccccttgccccaggtctgggtcccggcagggctggaaggagcctgagagggatgtgcgcagcacctccgagagtcccgctttagagaaacacgaatcagatcatgagaaagcagacctctgagaagtcagatgaaaggtcgtcgggggaccagaatcagggaggagggacacgacgctggggctgctggatgccgacaggagagcagcgtcccgtcgctctggactgccgaccccacagagcccagggaccaaaagccagaatgttccccaaacaccagggattatgggcccagcccctcctccctcagactcaagagtccaggcccccagcccctcctcccacagactcaggagtccagcccctcctctcccagacccaggagttcgggcccccaggccctcctccctcagactcaggagtccagaccccagcccctcctccctcagacgcaggagtccaggcccccagcccctcctccctcagacccaggcccccagcccctcctcccccagacccagaagtccaggtccccagcccctcctccctcagactcaggagtccagacccccagcccctcctccctcagacccaggagtccagacccccagcccctcctccctcagactcaggagtccaggcccagcccctcctccctcagactcaggagtccaggcccagcccctcctccctcagactcaggagtccaggcccccagctcctccctcagactcaggggtccaggccccagtccctcctccctcagactcagaagtccagggccccagcccctcctccctcagacccaggagtccaggttccagcccctcctccctcacctccaggaacccctcatgtctgcaggccccacgtgcccctggaatctgcacacccagacccccgtccctcctgctacacttcactgcgcaatttcctctttccccacctttcgccaggtctgagtggagagggtaggagatgaggaggaagtggaggtttcgaacctgagtccaatccttcagatcctcctcatgcctgacccttcctcaaggaaatccctcagcttccacttctcctcactccaactgtggattcctgtcctcactttccttcctggtccccgtcctccaggctccccaccttcccttcccacctctgtactctcacatctgagtccctaaatgcaggtcatggatggagaagtcacctctctgctgtaagagtccctaaatgctggccatggatggagaagtcccctctctgtcgtaagagtccctaaatgcaggtcatggatggagaagtcacctctgctctaagagtccctaaatgcaggtcatggatagagaggtcgcctctctgctgtaagagtctctaaatgctaaccatggatggagaagtcgcccctctgctatgagtcactgaaagcacatcatggatgcagaagtcaaatagggtcttggagagcagcttggaccctgtcaagtcttcagatgcagaatctgaggacctgagggatagcagcttgccgaggtcacacagccttgacaaggagcacagctgggttcctccttcccatttgattcctacccccttgccgccctccctcctccaagacccctcatcctcaagcctcccacccttctcccgatactgcatgtgactgcagcgggttgtatcccctagaaagatatgtccaagtcctaaccccagatacctctgcaggtgacactacttggaaataggggctttgcagacatacttaaggatcttgagatagaatcaccctgggtttagggtgggccctaaatccaatgacctgtgtccctagaaggatgcggacacagagggaggctgccagttgaagacagtcacatgaagacggagagacacagccacaggccgatggaagccagggattcccgggagcctccagaagccgagagggcaaggacggattcttccctggagcctcaagagggaccatgggccggaaaacacccggattttggactttgggtctccagaactgcaggagagtccattcatcttgtttcaaagcatctggcttggggtaatttgtgacagcagcctcaggaaactaacacaaagaccaaacagtcctcttggctcagttctgcacaatcctcactttatccccccgaatccccccaccagagggccatggagggtcccactgggcaccaggcctggtccatggggagcgacaaagaaccttctgctgtcattaaccgcgatggtttatcacaatcatgaccctccccgaggcctctcctacggtaacagcaacatctacggttccacacccacagggaaaacggattcagagcagcagcagggggcgggcaggctgtggggccgacagtgaacatggaggcaggctggtggctgggagggctccatgtgggcctggctgaggagccagggatctggagtcagaaccgggggaaggcagctggaacccagtagtggacttggaattccgcaaatcgtcctcaaacgtcttcagccagaagcgacggcggcagcggcgcctgcagacaggcgtcaggaagcttcgctgctgagggtatttctcaggctgggctgggctgggaggcccaggtccttgcaggaggagagggcctgaacaccggcccttcaagctccctagtcagtcagtcttgggcaccgggctcctgagggctgacagtgtgatgaggagctgggcagcatagtaggtggtcatgatcaccaggtgggcatggggcaggggctgggcgaaggtgtcccaggccagcacgccatcagagagcgtgaagagcagcgcgccccagccggcactcccgccctgggccaggccgcgccacagcatggccatcaggatcagcccataggctgccaccggcaggaccatatccggctcgaggtgctggagcacaaggctgaggtaggggccaggggccaggatgatgagcagcagcaggccgggctgcaggggagagaagccgaaggcccagacgtagaggaggtgggcggtggcaaaggcggccatgcctggcgggagaggggtggggtaccagtgaggaaggcccatcctgggaatggccccgaggtcacccctcagggcctaagagaaggaccatcccagagcaccaggccccaccctggccgagcctccttgcaggtctccccacatgcagtgtccatccttgctctgctcagaactgccaggaggccccaccttcccttggcctccaaagccccatggcctccagctctccagccactctgcgccagccaccctggcctgctgggctacaagcacctgacacgtccctgccccggagcctttacactcgcccttcctccacacaggcatacagcccttcagctctgcccaaatgtgacttcctcagtgaggccttcctcagcaaccctgcttcaaactgcagtacctccagcaggtcctcactgccctctgcgccacctcagctactgccctaacaccgcctgcccccacccctcgctggagcgtgagctgcctcggtcacggctgcgccccccactgtgcctttgaccactggagctctcacaggagccctctgcacccaggctcccatccaagtgctggggcctctctcacacgggcatctggaaagcgtcacagcaccttccactcaccagggacgaaggctgccggccagatgaggcaagcgtcccccacagccgagcacacaagggctccctggaggagctgggtgtagcccccgcttggggacatgacccacaggaacccagccaggcagaggacgggcaggcacttgaccagggcagcgaaccaggacagctggtcctcgggaatccagaggcagaagtacacgcagcaggagaggatgaaggggctcagccacctgcagacatctgggcgctttggggagtggggagctactgagccgaaacccagcccagcccccattcttgggactcagatctcatggctcctgtcccacccccacctgggaccccagctgtacaggctggacccattcagggaccaggctgccagaacccagcttcccagggcccaaccaactcaaggacagcagctcccagacccgccggctgctggggttccagggccctgtccccccagccccaggcacagctcagaaggctctcacctgggctgagcagtgagtcttcagggtctgccccgctttgccagcgtccatgctggcctgatagccccagagcgacctaatctgggagcgagtggcttcagggggtggaggggagggctcatggttacacgttaacccaaggagcgtcctgtggactctgtgactgataacagggcccagggagatgttgtcctcaccctggggatggccctgcctggcgcccgctgataaagcactgttggcactgggggtccctctgccctagcctgctgggacatggcttcctcctcctatctgcctggggaggttaggcccacaaatgcctgtccccttgtcctgggccccaacaatcagaagagatggggtgcagaattccaacagccaccccatcatgggaagcgggagaggggctggctggcaggagtgcccctggagggatgggaaggcgagtctgtccttcacttgctgccctagccgtctccctccctgctccatgaaacctttcctcattctgctcaaccccaccaagccctcaggggctccaccacaaacactgcttcaatgggtgaccaggagggaccaccacgaatgcggggaacaagcaccctctcctgttagctgagcgagcccccaggtgacctccaagccaactgccaccccagtgaggacgctgtcctcatggcccggtccacacgctccggtttcccagcgccgctcaccggtgccactcgctgcacacgcagcctacacttctaccttctacctgaaagactcagacctactgggcgccagtacccagcctcaatgctgggcttggttactgggggtaagcaggggcaggagcagggatttgagcctgtcggtggcttctatcctctgcccaaggccctgcccacaggtggggtagacctggcaggagccctcacagccagtgcctggcccagcctggggcctctgcagccacagggctccctctggcaggacagtgtgggggcagactgggtcaggagcacccccagcctctggggtgcagggataatacaggctccccaccccgcatcccagaacgtaaggtctgaccagcagaatcgtaaactgccttcctttatttatatttgcaatatgaaatagaagctcggcacaaacgcacgcacactcacaccagcctgggaggagggagctggggacaaggtcacttggcaacagggctgggacctcagaccctcaaggcccctggggctgttgccggggaggcccctgctccccagagccggactggcctggttgaaagtgcagggtctgggcaaaggcacggcccccactcgggaccctctggcacccccacccacgctgggccgtcccccatggtggacctgagctaaaaggccgggtgtgggcgtggccgtctgcgctgcagcgtgggacagctgggcacgtgggtggcaaccttgggacccctaacaccagctcccgctgggacggaacagggaaggctgtgctttggagccgccagcccagttcggtgtcctcactctctctcgctctcctccctctctctatataatatataatatatgtttctctctctccattctctctatttgactctctgtatctttattctaggaggcaacgctccaaaacttctcttctcagtgcaaatgggggtgggttgggcctgtctccctggcaccagcctcctgggggtccagaggagagaatgtgggggtgtcagggtgatgagggcaatgggggccatcgtgggacccgccctgcccccaccccgggagatccacgggaggacggaagatttggccgccgctgccgcaccaggcagctatctggaaacagagggagatgtcgtgtgagggtctagcaggcccagccccacctacccagcccgaggctgcagccacactcactgggagcctggggatgcaggcccttccggggcagagccattgggtatcggaggaggcgtgagggcctgggcactgtcaggggagagaggggatgtgcagaggtcacttcctgccccaccagccccacccccacccccccgccctgctgccctggtgctcacctctggctttggggaagccccaagggctctgggctcttctccccttctgtggtctgggggggctggtgggccccggaggctgggacagaggtagaggggtctctggttgcactgtgggtgagaggcaggtgcggctgtcagcgtggcccccaccgtcacctgctgacaccctcacatcccacccgactgaagtcggctcactgggtgtgtgtctgccacctgccccacggggaggggcctcccgaggacgcagctggctcagcgtggagggacagcacagccctggacaggaagacaagcacccctcttcccgcctcctgtccctgtggaggaggtactcgaggccggctgagacagccccaaagggtcttctgcatgctctcaccctcccaatccttcacaccctccaacgagcccttcccaaccctggggctcaagggccccaagcatcccaggctactaagagaagaaccagcctacagagtgcaaggggctggggcacaacatgaggctgcgcctgggggtcctgcaaaggaggcctggagcagctcagggacaagatgaacccagagcccacctcagcgaagaggagaaaagacttctcccgatactaggcagccccacctcgctgctcacctgtccgaggagctgggggcagaacggatcccgtggaaggtggcctgaaggtccccgatgctaaccaaggcctggcaaggggctgtgggggataagagatctcagctgcagctcccagcaagctcggagctggccaggctgctctctctgcccagggccgcgggtgggcagggcaaagcggggctcacctgagggctccgtgactttgctgccttctgtggcttcctgaggtgctgaggggggtgtggggtcctgagacctggtaggcgagagaggcagcccaagggggcagctagggttagcactcgagcctatgagaggacggggaccccatggccacctcctggcctcgggataccagcaccatttagcccgttccatccggttctcacctgagctgcagggcgtcacgggcaggagggctggccaggctctgagtggggaggccctggggcacactgaggggcccctgtggggctggaggcccagtgtgcagctcttcctccccggagactcgggggctggtcggggcatctgtaggcactgggtcaaaggtggctgtccagctggggcctgggatagaggtgggggagcgggatggagggtgaactcagtagcaggcagacagccctgtgtacacctgaccacaccgcccattcattcacctggaggctgagggccagggctggggtaggacagaggggtggcccctccacgggctgcacagccaatgccctcctcgtcttcctcctcctcctcgtcctcctcttcttcgtcctcactgtctgtgctgcctccactcctgccccagaaaccacctcgtcagctagctgtgtgggacagaccggccgacacccatcctgttccctgcagcccagggtcagcccaaggagagcgggctgggatgacaggcaggtcacagaagggtccagggagcctggggtgtgacgacaccaggagaggctgggagagggagttctgagccaacggcaagaacacaggcgggcagggacagaatgcggccgtaaggagaccgtccgtcgccagtcatccgtggagggcaggccctggggaagtgggctgagcctcagccatggcaaccagagcagacagacccactcaccagctctcaagccacctcccagccgtcacctcacacggtcaccacagtgacaggccttcccaccagcaggcccaccctctggacagaggcttcacactactctctccctccaactagaaactccaagaaggcagagatggctgagttttgccactgctgtatcctcagccctgagaaaccaccaggcacccatagctgctccaaaaacactggctgaatgttgactaacacacacctgtgagcatgaagaaaatccaagcaacctacgtgctgatcaaccggggaaggggtaagcaaagtaacactaaaactaagctttaacaacgagggtgcactctgaaaaacgccatcattaggcgattttgctattgtgtgaacattctagagtgcacttacacacacctggatggtggcgcctcctgtacacctaggctctgtggtatagcctattgttcctagactaccgacctatacagcatgttacagtactgaatactacaggcaattctaacaatggtaaatgtttgtgtatctaaacataggaaaaatacagcaaaaatagaggattataatctcacgggaccactgtcatatgtggtccatcgctgacccaaagatgcagtatgggactatatactatgtctaaaatgctgacccaatatttttgtcttaacagagtaactgactactttaactggaaagtaatatatctgtatatagttaaaagtaaactaaaatactcaacgactaaggagtataaaggaagcccctcaacctaacataaggcatctacaaaaccccacaactaacagcatgcttacatggcaaaacgctgaatgcttccccctaagatcaggaacaaaacaaggatgcctgttcttgccacttctgttcaacattgtcccggaggctagccagggcaaccaggcaagaaaaggaaattaaaatcatccagatttgaaaggaaggaaaatgaactctattcacatgacatgattctgtacatagaaaatcctaaggagtccactaaaactatcagaactcatacattagttcagcaaggttgcaggatgaaagatcaacatacaaaaacctattgtattttcatatacttgtaacaatctgaaaacaatttcaagaaaattccatttacaatagtaacagaaagaagaaaacaggaataaacttaaaagaaatacaaagcctcatactctaaaacctacgaaacattgttgaaagaaattttaagacctatataaaaagacatccatgttcacgtattagaagacgcaaggtggcttcttggttgaaattgacaagctgatcctaaaattcatatggaatctcaagaaatcccaaatagggcaaaacaatctttaaaaagaagaacaaggttggaaaactaaaacctcccattttcttttttctgtgagatggagtttcgttcttgtcacccagactggagtgcaatgaatggtgcgatctcagctcactgcaacctctgcctgccaggttcaagcgatattcctgcctcagcctcctgagtagctgggattacaggcacccaccacagccggctaatttttgtatttttagtagagatggggtttcaccatgttggccaggctggtctcaaactcctgacctcaggtgatccatccaccttggcctcccaaagtgctgggattacaggtgtgagccaccgtgcccaacaaacctcccattttcaaaacttactataaagcaacagcaaccaggccagtgtggtactggataaaaacaacacacagactgatagaacagaacagagagggaagaaacaaactcatacatatggtcaaatatttcctttttacacaggtgccaagatgattcagtggagaaaggacagtgtcttcaacaactggtgcagggaaaactggttatctatatgtaaagggatgaaggtggaccacctcacatcatatacaaaatttagctcaaaatgaatggaaaaccatagaaataatgctataaaactcttagaagaaaagagagggctaagtcaagatgctggatttggcagtgacacacttgtgcaccaacaacacgtgcaagggtattcacagcggccgcactcacagcggctgcactcacagcagcgagcaacaggaacctgcccaaaggcctgtcaactgcagaacaagcaattcagctgcagctcatcatgcatggcactgccccactgcacgagagccaggggcacccaaacacacaacagggaaggagctcacaagcagagtgttgagcaacagaggtcagacataaaaggagatgctgtatgctatatcaagtgaaaacagagacaaaactcatctacagggttagaagccaggacaactttaccctcagaagggaggatactggctaacagaggggatgtgggtactgggaaggtcctgctcctgggtctgggcactgaggaaggatatccattggccacacactcaggatctgtatgtacacttgtctatacgcatgttacatgtcaataaaaagtgaaaacagcctaattccgaaatcaaaagtcatgagtcaaaaactcagttgcagatgatgacttagtgttcaggctgtcaaatctacatggcatgaacccatttcatcacagcgactctggggccggccagtattaagagaaaaaaaaaaaacaatgtaacatttgcactaaaatgtcatcacagcctgattggagagggacgtcatcatctctcattttactggaattagagaagagagaagctgcctgggaccatcttacccccctttctaggaaaacgtgtgagagctaacacgaggaagtgaagtgaagggatgaaggaaggagacagggaggcgggaagagagagacacacacagaccaagccatacctcaggacctgcctattttttcagccacagagattatcccttt[136 bp omitted]cattctcctgcctc[223 bp omitted]ttgagaccaggtctctgtcacccagactggagtgcagtggtgcgatctcaactcactgcaacctccgccccccagggtaaagcgatccttccacctcagcctctcaagtagctgggactacaggcacacgtcaccacatccaggtaatttttgtagagacagggtttcgctatgttgcccaggctaggtctcaaactcctgagctcaagcgatccatccaccttggcctcctcccgaagtactgggattacaggcttgagccactgtgcccggctaatttgttgatttcttaatgcatcatctacctttttttttgagacaagtctggctctgttgcccagactggagtgcagtggtatgatctcggctcactgcaacctctgcctccctggctcaagccatcctcccacctcaacctcccgagtagccaggactacaggtgcacaccaccatgcccatctaacttttgtattttttgtagagacaggatctccctatgttgcccagggctggtctcaaactcctgagctcaagcaatccatctgccctggcctcccaaagtactgggattacaggcactcagggattacatgagcccaccatgcttggccttgaattagatttctatcactcaaaagtgaaagtgcccccaactaatacacacaccaatgcaggttccttattttcttcattcacttcagcctcagtccaaatgtgttggggggaccccttggccctgccgtgtggtggaagcttggagaagggaaactggagggggactcaccggacaccaggtggctggcccagacgggcccccctggccagctggctgccctgccaggcgccatcttctccatcagactcccctgagccctgggcctcttcctcgtcctcctcttcctcatcatcatcaaactgctggatgcggtccttgtagcatatctcaagtaggttggcgttgggctgcagggcacaggggtgggaggatgggccacactgcccacagccccacacccctccacccgccacaaccaggggacagggcagtactcacgttctcatcgtcagcattgagggagaaggtgatgttggctgtcttgtcaaaaggtgcgctaggagagaaggcaaggcatggtgagaaggtccacctgggggtgggggcagcacaggacaggccacatttctttcttcactcaacacagagctgaccctcattacttgcagatttggtatctgcaaattcacacacaacccgaaccactggtcctaaggggcaacgcatacatgaatatcaacatctcacatatgatcactttaaatccttaaaaccactcattgaggtaggctgtttcccttggctctagaagtgagaaaatggggctcggaaatgttaagcgactctcctcaggctcttccaaggacaggtgccagagagggattcagatccatgcccttgtccccatccttggggcatctgtaggaggctgacactcacaccagccaggcacaagcagaatgtgagactacagcccaataaagcacatcccctaacctcaagatgtctacggtccgcggctgaaattctaaattatgggaaaaagaatcacgtcaaaacttaaactgtgcctgccagggccccacctccctcaccacgagggtctaatgatcagggtccacattctgtcccacgtgttacggacagttcaagggatcatttgtctcaaattcatgaaaaattctgccacaaagatcaatggataaaggacagttaattcttaaaggacactaagtatgtgacagacattactcacgcacttcattctcacaaccaccttccaaggcaagtgtccttagtccctcctagacactgagaagcagcggagcagagaccacgctgggcacacagtgggtctagggcagggcagcccatgtccccgtggcactggcagcctcagctgacctggcttctgctacaggagctatgcggggcagcatcttcagccttgagatgatcaaaccagtcatccactttccattccggaaatctttctgggtttagttttgttcacttaacttcttaacccctctggaattttcttggtagaggaaaagctaacagtttcatcccgaaaggggcagctggtgaccccaatgccatctaccagtcagtcccttcattctcctgccagggtggggttttcttctttttttttttaattaaaaaagcagagatggtctcacaatgttgcccaggctgggctgaaattcctgaactcaagcgatcctcctgcctcggcctccctaagtgctgggattaagatgtgagccactgtgtccagcccagttttcacttgagcatcttctccaggggtctcggcacaggccactgacccacaaagaccaacgctctgcaagtctccatgctgggcacagaagcagccaacacaggatatcacgtctgcatctgagaggacctctgtccagctgtggactaagccaggaacagctgactatccctcatcgtggtgtcccttacgctgtgctgtacagggaccccggggcagccatgggcagccatccagctcccacacactaaccagctatgtcctggggcctcagtctccctggccgtaaatgagctcatcgtggggagcaagacagagtctcgctctgttgcccaggctggagtgcagtgggacaatctcggctcactgcaacctccgcctcccaggttcaagcgattgtcctaactcagcctcccaagtagctgggactacacgcacctgccaccacgcctggctaatttttgtattttttagtagagatggggtttcgccatgttggccaggctagtctcgaactcctgacctcaggtgatctgcctgcctcggcctcccaaagtactgggatcacaggtgtgatccactccgcccagccacttttttctgactccagaagcaacagatgcttgtggcaagaaactcagaaaagttcatgatcataacacccagaggtgactgatattaagatgtggttgacccacaaatcaaaacaagcagaattggtaattggaaaaaaaaagttttgttaccccgaggcctgtggaggggaaaactggacccccatgtctggcagactcctgagccagagggcatccatggaggtgcagctctgccccacagtccctgcgccaggactgctggtccccactaccctgagcccctcccgcctggaacccctaaggctagctccaggagtgggagggacccgctctgtgtccccagcacagaagatgtttgtgccccaccctcatggcctgcctctcggagagaagagactgcagagctggaactcatgtaacaggaggcagacacacgaggctgcagacacacacacaaggccacggccaacgcgtgcccaggaggggccacagctgcaggctgagcccacagggcatgtaggtgcgtgcaggggacagatacaagtaggcgcgcctgctgctgcagaggcaggacagggctgtgaccctgcgcaggagacactcacttcacactctcctcctgctccccaaactcctcatcattgaagccgaagtggtcaatgaaggcagaggtcatgcgctgcatctggaagtccatgaaggcctgtgggggtgcggaggttagggctggagggagttgggcaggaccccactccagcatagcccagcacagccccacatagccccacgcccacctgctgcagcacagcctcctcagggaagttgaactccttgagccggtcgtcctcatcgtcactggaggagtgtaggtggtgggtgttcacctggggagaggagggggcgtcagggcctgctggagcccccagaccagggtgggcaggcagctatcggtggcggtgggaggctaagactggcccaagagagagaagcagcaggaggagtgcaggaagagaagctgggcctcaccaggtccaccatgttcttcttgttggtctccgccaggggccccgatacgaaggcttcccactgctcctgctgctcgctgggcagctctgcttaggtgagaggggtgaagacgtgaggcatctcggggcttcaagccccccacctagccctcaggccggcctggggaccctcacccttcagcagctgccgcagctgctctgcattgggccccttctccgtgttctgcaccagggcaccggccactcttgtcaggtgacccatgtagcctttccgagggcctcccgcacacctggcaagagtgaaggccgcggctgcaagccaggactggacccagggatgcccagccccagcccggccccccatccaggcagccccagcccctggagacatgaagggcagcaggtgctcactgtacacggtcgttctcctcccaggacgtcaggatccgctccaccaggcggcactgctgcagcagctgcgggagagcgggacaggatggcctggaggggtggtctgcacacatgtggggagctctgcactgcagcaggggtcccttcctcagcagatgcttcaccaggcccccgctcatccagagacggggatgggaaggagggatgcaagctggggcttgggaccctggcatccacccaagtctctctggtctttctacaaaagaatatgtggtgcatacacacacacacacacacacacacacacacacacacacacacatgcatgcactaacggacacacacatgctcacacatacatgttcacatactcgtgtgcactcacacacatacatgctctcacacacgcttgcactgacacatgctcacacacgcacgtgtgcgcactcatgcacactcagctgctcgcaggtctgctcccgcccacccctagctcttcagctcaagtcaggagcccactgctccctgcacctgcatgtttcatccgcgtttctccctggccatgcctcccacaccccatctgggcgctggcacctaacactacccaacaaacacttgtgggaggaaggagtgaggggtaggcctctggagagggtgcgcccacaggggatgggcccagaaggagggggaccagggagtcccagctcacatgtttcacaacagggttttggatgggcgtctcagggctgctgtcaggaggtggccccaagctcagcatggtgctcacgcatccctctacttgggcatgcaagaagttgttgaagacataatggaagaagaggtcctatgggaggacacaggattggtaccagagaggccccgccccagccgagcccccaacccctgagcccccagccgagcccccaccccagcccccgaaccctcagcccagtccagtccccgccccagcccctgaacccccagcccggtccagtccccgcaccagcatggtgttgggcacgtccagtgccaggagctcgtgcgtcagggctgcatcattggcgctcagggcactggccaggagcttgaccacgtgcagccgcgtgttgcccagaggcggagccagcatgccccatgtcatctgtagcggctccagctgcagacacagggaggcctgattcccaagggctgcccttcctgcttcccccgcctccccgaggaccagaacccacacccctgaccttgggaggctccagcaggagctggtggaagcagctgagccgcgggcgtagggcgtgcaaggcgcccacactggacacagtgctttccagggccccctgggccaggagctccagctgcccatccacactgctgaagaagctgttcacggtcacggactcggacctgcagcagggcagggtcgaaggcggagtgagcctagatggcctgtgcgcccacacaggagtaggcacaaggaccacgtctgcagggtctggaggaaaacgaggagccacatgcccccagcgccgctctcttctgaggcccttcagacaacacctggctggggtggggagcccgccaggcggcagcattggcagtccactgtgagagcacgggtgaggggtggaggcgggaaggcaaacccaacaggctagcggcctgtgtggtaaggcaggggcacgggggcctggggtccctcccaacacaagctgcagcagtggcctcagcctcagtgccctcacttgtcaaagcagacaagaagattcctccctcggccccgtactgtccactgtgcagggagcacaggcagccacagagcaaggtgccacgggcggggatttctcttggtggacaccgagacccgcctctgaggggccggagagcccctggggatgggcagcatgcatggtctgtggcccgtatccctcacctcggcctcctgggctccagcagggtcagcagcacctggatcccactgacgatgacagactggctctgctccccctcgaacatgttgcttaagagctgctcaatcgtctcctgcctgcgggggcaggggcaggggtcagggtgaggggccaggggcccagggcttccccaagtcagctccccccagccttagccttgcccgcacacccacttctccagggtggccagcagttggtcaggctctgggctgtcctggacttggatcatctgctcccggctcaggcggatgatgtcacacagggactgggatgcgttggaatgttgctggaacggggagagacaggtgaggatcctggtcgggccaccgggccctctgcagcctggtgctgggagcccctcccatgagctgaccatccagggaaaaatggtcacccagacacagggacacgtgttacgaaggaggagggcacagaggcaccaactgctggagggaagatggtggagagaacaggaagcccggaaggctccccaggacaggaggcatccacacaaggccctcatgaccgcatacagggctggcagcaccgcccacaatgacccagaaggctctgactgatgagtgaatatgcccaagctggtctatccacacaggagagtgctaatcagccaggaaaaggagtgaaactgatacatgcaaccacatgaatgagccacaaaaacatcatgctagagaaagaaaccacacacagatcacgtagtacatgattccaattatatgaaatgtccaaagacaaatccacagagacagaatagtctggtggttgccgggggctaagaagagaaaggggaagatcaggaggagctgctaatgaacacagggcatcttttttattttttctggagaaagggtctcggctgggtgtgat[145 bp omitted]aaccccatctctactaaaaataaaaaaattagccaggcgcagtggtaggcgcctgtagtcccagctactcgggaggctgaggcaggagaatcgcttgaacctgggaggtggaggctgcagtgagccgagatcgtgccactgcactctagacagagcgagactccatctcaaaaaaaaaaaaaaaaaaagaaaggccaaggtggcaggatcacttgagcccaggagtttgagaccagtcggggcaacatagcaaaactctatctctacaaatacaaaaaaattagccaagaatggtggtgtgcatctctagttccagctgttcatgaggcagaggcaggaggattgcttgagcccaggggggtcaaggctacagtgaggcaagatcacgccactgcactccagcctgggcaacagagcaagacactgtctcaaaaaaaagacacggcctctacatcaccccaggcttgagcgcagtggtgccatcacagctcactgcagccctgaactcctgggcccaagagatcctcccgtctcagactcttgagtagctaggattacaggtgtgcaccaccaatgccagctaatttttcaattttttgtagcgacaacgtcttgctatgttgcccaggctagtctcaaactcctgggctcaagcaatcctccagcctcacctgccaaagcgctgggattacaggcaggacttgttttttggagtgataaaaaataatctaaattcaacaagatgataaacgctttgaataccctaaaagcgctgaatcgtaagcttcggtgggtgagtggtatgctgtgcaatttacatctcagtaaagctgctacaaaagagagaaaagagagaagcataagcagagctgagtctacccaacgggcagctgccagggcttggcagtgtggccctgggccatgcctcagggtcctcacagggacaggccccagcctgggtgagcccagagccatctctgctctgtaagcctgtgcgcctctgaggcagaagttggcattgggaaggacatgttgctcccagtggcctcggatatctgaggctcttgacaaacacccactctacactaggccctgtgctgggcaccaggacagagatggagacccaagctggagaaacacatggacatggggtcccccagagctaaaggggaggatgtgagggcgcttgaaagcaaggctgctggacggacacttagaaggacagcaaggggttcaatcaggcaggagacagggaaaaagctgccaggcccagcaatagcacaggccagggtgggcagggacggatgtggggccagcgcttggacaggcgatgaggagggcccctccctgcaaggcattatgtgccaagttcctgggtcatgaaaaaaacctttccagcactttcggaggccacagtgggagaatcacttgagtcaagtttctttccttttctcaaagggcatggatacacctggttctcaatgctctcttttctcaccaatttcttttctttctttttttttttttgagacagggtctcactgtgtcacccaggctggagtgcagtggtgtgatcatgactcactatagccttgacctcccggctcaagcaatcctcctacctgagcttcccaagtagctgggactacaggtgtgcaacaccacactcagctaagtttttacgtagagacggggtgttactatgttgcccaagctggtctcaaactcatgggctcaagtaatcctcccacctcgccctcccaaagtgctggaattacaggcgtgagccactgcgtccagccccaattcctcttttaaaagtggggaagtgggcatggggaaggaactctaaggggaatccgcaggggcatcggcagcactcacattctcatccttcgacgggtggatctgctcaatcagccgctggacgatcttctcctcgttgagccactgagggtgagaaggcgagggatgcatcgctgtccaccacgcccagccccccacccccagaggagccggccctgctcacattgacaacatcctgcctcagctgaggccgctccacacaggtgagcaggcgcagcaggaggtccatgatggccgaggtgccaatgtgctgcagcagcaggtccacgaagtcatccttcttccgaagaaaggacacgagctgggggcacacgggctgcgtcatgcacagggcctggcccagccaccacccctcaacccacggtggcgccagggtgggggccagggcacctggtctgtcttgcggttgatgaggatgcccatgaccttgctgaagaagctggccagcagtgggttgaggctgccggtgctctgcaggaagccgtagagccggttcagaagggactcatcagcacccagggcatcattgatctggggcacatctgaggtcagaatctcgcaggccacactggggtacctgggaggcaagcacaggcgggtgggggctcgggtcggaggccgggggcagggggcggcaaggctccaccctcttctctgcaccgggcactgggtttctgggaactgcagagacccctgtccaggaaggggaaagggcagaggacagggtgacgcagaaacaagggcccacaccaggcctcctccaccctgctaacacccaaccatcccatcctaggctccttaccacccccaagacaagctggtcctgaagctcctgcgcttcccaatcccccagcagctaacactcatcccttttgcctctcagcggcttcacttgcaaccccgtatgctgccccagctccggctgactcctggaaccttgctcaacttccaacctcacctcctgcctccctcctccaaactttcacacggtgcctgacggctccaagacaagagctgccccaccagcgtgccactcaaggccctgaggggccacagtctgctccaggactgtggggaggtaccccttgggaggctgaggcaggcatatcacttgaggtcagaagttcaagaccagcctgggcaacatggcgaaaccctgtctctaccaaaaatacaaaaattagctgggcgtgctggcttatagtcccagctacttaggagggtgaggcaggagaatcacttgaacttgggaggaggaggttgcagtgagccgatcatgcctctgcactccaacctggtgataaagtgagtctcaaaaaaaaaaaaaaaagtgtcttttcagcatcgcttggattaaaaaataagtaaagtgtcttcaatagcagacaagtgtttcacaaacatacaaaaaaagtttaataaaaagtaaataaaataaaaggcggcgaataaagagaaaaaccagccgggcatgtcgtcacatgcctgtggtcccagctactcgggcaactgaggcgggaggatcacctgggcccgtgaatttgtggctgccgtgacccgtgactgtgccactgccctccagagcacaggcttggtctgcacccggtgagctgtgaggccttgtgcaggagcctggctgctcccagcctcgtcttcctcatccccaaactggagtttactgacactgacgcatttcagggtagctgtgaggcttgcgtagtgaaggtatgtgtgatgctgatagggacgggctggccaggagctggggaactcacttgtagcgcagccgctcctcaccgctatctggcggctcctgggtgacccaggccaccattgcttgcaggtggggtggctgcagcaggaagtccagcagcttgcggttgacgaccttgcactcctgcagcacgtcttcctcgtccagcagctcgggcaggctcaggtcctcccgctccagcagcgtgtccaggtgcgagcttgtgtgcaggtcaaacttccaaaacatggcgccctgcaggcatagacacaaccagcgccgcgtcagacgccccagggagtccccactggacgaggcactgaccacaggggctgagtgcccaccttgggcacagcctctccccaagtcccagccctctgcctcatgctgagcccggccccgccccgggactgcccgcaggctcactgcctccatcactcaggcttaaggctcccagtgagcaccaggctcctgcagttgccctcgagcctgcccctcttcccccatctccagcctcccggccgcctcgcctgaggtccagggggtcatttcacacctgaggcctcaggcctggtgaagtccccaggtgtggaccatgtgcagggcctgcgagaagaggctggaccctgtgcactgaggggcctcgggccctgtctccccatgagggtctgggtccactatccctacttttgggagagacactgcagaggcagggccttaacctctggcttcaaatttgcttcaacctgtatttgctcaacaaactcagatgcccgatgacttccagcacacggctgctgcttggcccagcaaatcccccaaggctacgtgggaggcatggggcggcggcagggggaagagaggaagtctgtgcatctccaggctgtggccgttgcctggacaccactcacacacaaacacaccccaaccatcctctcacccagcacctgggctggaacaaggaagaggaaaagttggaagggaggggctcccagaatagtcactgaccaggacctgaaggaacccagggtgggatagacagattctgtgggggaagaacaaagctggcaacacccggccctgaccctgtccccatctggagctggctcccgccctctggaggacagtgcctggttcctcagcctggttccagcccctaaacgctcgtgcatgggaactcactggcaataaggaaacacacacagagtattaacaagatgccaggcaactccattctgagcccctgccctgtactacatcactgctccgcagagccctagaaagcctccacacagaccttccactacagacctgacctgtgacctgtgctctgggcacttgatgacaatggtcctggctctgcatgtgtgctgtgcacatgatgtccaagctcaccagcagcccccaagaaagctgtcatcactccgccacacaggacaaggggcaaccaaagcccggtaagtcaggcggcatcctggaatctcgaaggccatctggtcccagcagacagccttcacggagctctcaccagttaagacactgaccagagctcacgctcattacctgcctcctgacaaccgcatcaccagctaaggcagaggccactgctacccccaagtcactacagaggatgctgagaacagagcagagccggcacaagaggccaagggtgcctctcccgcaggccctcaccaccatcactcccaggcacagatgctagtccctctcctccaatgcccttctgcagcttcttccagttcagtcattccctctgcacaggcctccaccatctcctcgagccctgctgacctgtcacctcagtgcccaccagcccccaggcctgactcagccccaggccccagggaagagacagggagacgtggagcaccaggcccagggaagagacttcatcggagcttaggagagcagcctgggctgacaaaacgcaggacagagtcccacacatggcctcaggcaggtcgaacgcctcttgggcctcctttcctctccttcctggctagcttgaagccaggccagcctggggccaggatctccttgctcatccaccctgaccaccctaaggctgggctcagcacagaaggttgcagtccagaccttgctcccagtctgcccgtctgcctcggtaactctagattggcaacaatcttgatataacactatatgggtccctacacctggccaatgacagttgagggtggagcagagggaagagttccgtgaccaacgacagtcatggcggcagcaggaggactaggggagatagcagcagcctccaggcatttgaacccctgctcctctggggggcctgccaggtcccagtccacagcacccagtgactcaccacttacccctcaccagtccacttttcccaataatcctttgtttttgaggagtctcactctgttgcccaggctggaatgcagtggcacaatctaggttcacctcaaccttcacctcccgggttcaggcgattcttccgcctcaacctccctagtagctggtactacaagcatctgccaccacacccggctaatttttctattttggtagagatgggatttcaccacgttagccaggctggccttgaactcctaacctcaggtgatccgcccacctgggcctctcaaagtgttgggattacaggcatgagccaccatgcccagactcccaatattccttctaaggttgggtgtggtggctcacgcctataatcccagcactttgggaggcccaggcaggcagatcacccggggtcaggagtttgacaccagtctggccaacatgatgaaaccccgtgtctactaaaaatacaaaaattagccgggcatggtggtgtgtgcctatagtcccagctactcgggaggctgaggcaggagaactgcctgaacccgggagcggaggttgcagtgagtcgagattgcgccactgcactccagcctgggtggcagagcaacactctgtctcggaaaaaaaaaaaaatccttttaaagcacaaacatgagtacccgcacctgctcggtgatgtgcactccaccaagcctgcatccaggctctcgtgcccctgcccagccagctcactgactgacctccatgcccacggtgaccccagtgccctggggaggccgtgccccatgccacctcgccagtgctcctggggctgccacttcaggtgtctcctgcacagcccgtggctgcctgaggcacagtgctggatggatatccaggaggccctgcgggtctgggtggatgggggcattccaggcaatgatgtcgatggtatcagccactgcgctccagcacctgcactgcgctgactactctgaaaaggacttcacagccatcacctccaccaactctcacaaccaccctccagggaatggccttattttacaggagaggaaactgaggcacaccaaagtaaatgcctatgccccgatccaggggttggcgggcagtgaagctggcactctcagctttcagaagttgtattttcagggtgcagagcccttgtcccagcacagggcctgtgtagtggacacttaagggatgaatgagcgagttcccgctgagccggctccagcacttgctctgcctgagggactagccctggccacagtgaccccgactctcacctcagggaggagcctgccatttccaggcccaccctgaagggacctgtctggatggtaaactccctgtccaccttgtccccagctgctagtgcttactcaacagacatccctggattcaggatggagggctgtggtcctcaggaccctcccagcccagctgtgacagcacagttcggccagaggcctgagttctcctccaacccagcaccaccagaaatctagggacttatcaggcctcccaccccgacccaggcaccgctgacctccccaaacataaccatcccaccccttctgcctgcatgaccaccacttgacggcaggccccccacactcgaccgcaggcgacccctgctcgttccctctccccacagccatgcagagcttgctgaagggaaaatcagaaccgccctctcatcgggtcagcgcctgggaccctcaatgacctcccactccctacttgccctggccaagctggccttctgttttcagaacacactaagcttgggtctaccccagcgactttgtcctaataactcactttctcatcctcagatctcttactaagcattcacctcacagaagggccttccctggcctgcctggctcaagcagcccccagccccgcctttgtccaccactgtctccctgtctccctgagctgtgcgttctgacctgccgcctggaagcatctctgtgacacagcaatgaagcactggaggtacacactcgtggccctacaatgcttcctctagaaccttccccctaggttaccatgggcacctgagggcagcacctagcatggaacctggccctggcaataaacgctcacaagtattagctgaaaagcaaacctcattttcacaaggccccagctcctcccaggcaggaggctgccgtacctgtcagggcgttagacgaagtgaaatcactcccactccggcccctcccagccactcctacggggtccctaaatcaggaggtgggggaaagtgcaagatcgccctgggcaggcaatgggtgtgtattttcccctgtgtcaagagtgacgaaggcaccaccacctcacaaggaaatacaactgtttcccttccttgctccgggaacctctgtgtgcacagtggtaactccccacctccccacttctgcccagatgctagacctcctcaagggaccatcccctacttcccagcccgcttgacaaggaatgcgacaggccgaccaccaagtgtccatgtcacagatgagaaaactcaggctcagcaaaggtgactcaccagcgtgctgagggaagcgggagggggaatggatttcctgatctgggtgtacctgggaccagaataatctcaaggggcaaccgccaaatttatcatgactctgccaatttccggcctaaggctgtggcgagcaaagcaccgagacgtggcaagcacacacacacagcctctttctccgtgggagaccaagcaggctgataggctgcccatgccatgccagcaaagccagtcccaaggaaccacacactgcaggcctccaactatgtgaagcatccagaacaggcaaatccatagagacagaaaagagcttacaggcttccaggagctggcggggattgggcgaagttcctgaaaggaaagggtgattaaaaaaaagttccaaaatcaattgtggtgatgtttccacaacgttgtgaatacactaagaaccactgaattgtaccctttatttattattttttttcttgagacagagtctctctctgtcacccagcctggagtgcagtggcgcgatctcggctcaccgcaacctccagctcctgggttcaagcatatctcctgcctcagcctcccgagtagtggggactacaggtgcgcaccaccattcttggctgattttttttttttttttttttgagacagagtttcgctctgtcacccaggctggagtgcagcggcgcgatctcggctcactgcaatctccgcctcccggttttaagcaattctcccacctcagcctgagtacctgggattacaggagtgcgccaccacacccagctaatttttgtgtgtgtttttttagtaaagacggggtttcaccatattggccaggctggtctcgaactactgaccttgtgatccgcctgcctgggcctcccaaagcactgggattacaggcatgaatcaccacgcccggcctaatttttgcatttttttagtacagacggggtttcaccacgttggccaggctggtcttgaatgcctgacctcaagtgatctgcctgcctcggcctcccaaagtgctgggcttacaggcgtgagccactgcgcctggctgtacactctaaatggatgaactgtacagaatatctcaataaaaactgttgggggaaaaaaaaaaacctgcctcaggccatcggccatggcagggacagagccagggccaggctcaggccttgcactatgtcccagcgtccgcagagctgatgagatgccggccagcctggcagagctgaagctgccaaggctcagccctggggcactcacccaggttaccccttccccatccctcaccaccaacagctctaagctaagtgagcccctccacagtggggacgggataggagcagcaccaagccagcatctgtagaaaatccatggacccgcacttgcagagacacttgtctcggctccacatcaagaccaagtaaagaattcttattattccgacagagtctcatgtggaagaggggcccagaggggtggagccacatggctagcaagaggcttccagtgtgccctggtctctaaacaacaggcagaaattctcacactgaggcccaccgttcacttctaagatacctgattaaagggcacaggcatggccctcggcccccaaaccccctacccctggtacagactaaccatctgcttcggggaaaaggtcaggcttcccctccaaaccgagctccccagacaactggggcaggggcagccagaatgagacgggagggtgctcgctggtgcacggcatccaagaacttcggccctgagaacccaggcagcgccctgaactctccatctcaagtggctcctctgaaaatcagaatagactgaaaggctcaaatgcaattgagtggtcgacactctacagacctcaattatcaggctctaaacagaatgaagatgcaaatatggaagaacagaaaaaaagagaaaaaaactttcccccaccacaacctctgaatgcactatggcctgaagccctctcagtcccctctcccaacctaatgaagcctgctagaatccctgcgaatggagcaggagagtgggtttcactcgcactctcctggtgaacctgggcaggcgcttgatttctctgagtctcatttcctcatccgtgaaaaggagacacagcccaccagggcgggctgctgtgaaaaggcattgagctaaagcaggtggccgtgacacagcaggagctcagcaggtgcaagtctcttccggtccaaccctgaggccacgtccagatgctttctggcaggacaggtaggggaccggtcactaccccaaaggtgatggtgctaaacacagaggagcaggagaaagactctacccatttgcctaagtgactcaagtacttttcctcagaccattcggatactacggcaggcgccatgcaccccgccacccccattctttgcaacttttagcaacttcaagaaagcggaagtgactaccactagtttttagctaccgtttgaaaaccatgagtctggctgcaaacggaagaaggggaaattgtaaatgagaaaggaagccattaaaaacgaaaactacctctgccgctctccctccaccagctctgcactattgcctctggtttctgacttagctgtggtgttttagggccttcaacaccagccacccctcaagggcctgccagccccttccttcccctgcttggacaggcactaactgcggctcccacagagccatccccactgctgcacgtatccgcccaagcacagctctgccgccagggaaccggtgggcccatgcttcatctgtcaccccttcccaacctgcgctgacccacgagcacccagaaatggaggtcatgggcacagatgcctcagggggcctccagaaacagctgcctgagctgtcccaatgctcagcagaagctccaacgcctggccccctggccggtaccctaggaagggaaagagcctgctaccagcagcaggctggccagcacccagctccttaaagggcccagagtccggaggacagcaagaccatctccctctaatgtcccccaagcctctgtcagctctcagccaaatctgaaagggggctgggaacacccaattccagggatgcagtgacagtaatggcaaccccaccacctctgggcaggacctacggtgtgtgccggctgcagaatccggcatcacccacccagcaaggaggaaccagggacaccaatttgatagaaagggccactggggccagaggagaagggggagcggcccaaggcccaacaagatgatgagctagggctttcctgtggcttgggaaagccttggggagggtccccacttaaagagaaccctcagtgcctccccctctggccccagaagcacaccctcccaagggagctagcagccctggtccaaccccagaggatggaataactaggaaacagaagagtctagaaacactggccaaggactgggacggggacttgaacatccacattcaaatcgtctcctgaactggccacaggtttaaaggaaagaaaggaaaagaccaatgaacggatttgaaatagctctttggaaaaacagaaaggggcagagttagggttacagtgtgatccaaagtcagaaaagcttgcattcccatttgacctccccaaactgaaatctctgtggcctagaccaaggatctcaccccaccgagccccagtttccttatccgggaaatacctcacagatggggttactataaggcagcactctctggagaaggacccacaaaactggtgtgcaaagggaaaaccacggtttggcatggaaaggcaggtgagccccatcaagccgggtgccgagtgattcccactctggcaaggcccctcactctcaccaaagctctcaggcctctctcacctcatctcttgctacctcccgcgtgggcgtcacacctgactgccctcagccggggctgggctgctccctcctccttcccggagctcttcgagtctgactagctcctcctgggtccttcaggcccccacacagacaccacttcctccagggagcctcccccccgcatctgtgttagaggcctgctccacgccgcttccacagcatcccgcagtcaccctggaacagcatgtgagcctcggctctgtgacaggatgtacctgttcagtcatctgcctccccctgaaacatgccgacttcccaggatctagcataaggccaggcccaactaaagctacttgttgaattaatgaaaactgaagccagagaaaggtgttctgttaagagcactgggccacacatcccacaaaagaaaaaaaatgggcagggggaccagacaagcaggttctcctctaatggaaagaaacagtagatgaaccaacaaaagctaatggccacaaagatggtggtgactcgcaatacacaactcaccaactcacagctcatgagtcacaacagagcaaataagccacaacgacacaccataccccagcagtggagcaaagttctcctcctctgcgctgctaacatttgggctggacggttcttttcggtgttggggctgcccatgcactggaggacacttagcaacatccctagcctccacctccactcaccagatactggcagcattccccccagttgtaacaaccaaaaacatctccagatatcgccaatcgtcccccaggggacacaatcgcccccagttgagagccactgcaatggacattcccaaatcaaataataatcgaaagaacggccaggtgtggtggtccatgcctataatcccagctctctgggaggctaggtaggaggactgcttgaacccacgagtttgaaatcagcctgggcaccacagcagggcaccagagcaagacccagtctttacaaaaaatacaaacattagccaagcgtggtacaaaaacacaaaaattgagcaagcattgcaggacgtgcctgtagtcctagctacttaggaggctaaggtgggaaaatcacttgagtccaggagttcaaggctgggcaaacgagcaaaacccagtctcaaaatcatcaacatcaaaacagctactgattgcagagtgtcatgtgccttgcattctgccacaggcttctacaaaccctgcacttaatccctagatccaccctctgaggagagcagtctgctatccccacttacagacgaggaacaacttgtccaaggtctcgcttggcagaagccggactcggcctaggtctgtctggcaaaagatcctctaacaattagctggactgccttctcatgatcccaatcccagaactagagttaaaaaaaaaaaaaaaaaaaaagcataacattttcaacagcacaagcagctccaacagccatcccaccactagtaagcacacgtggccgggcgccgtgtctccatgtgtgttgtgcatgtatgtaaaccaagtcctcatcctgtgttatccaggcaatctcgagtccttgctgcatttgcagcgcacgctaacagttagaccctcgcccttgggctggatgaaatcccactgcagtttctctacaactgtgaacccagtaccgcacctgacagtctacgcagcttcctttcctgaaacatcttgcctttcaggcgggtgtctatggtcatgtctgtgtgtactacgagcgagcaagaaagaccccaaccagaggtcccattcgaggcctggataagcacgccgggcggaactactctgcccctcaccctcccaatacatctgcactcaggactccgaccttccttccttgacatatctgcacgtgctgctccttccccccccggaaggcccttcttcccactctccatctgtcacctcctactcatccttcctagacagaaaaagccgtccgtccagtcagtctcaccagtgcctcccgctctgtggccccctgcagctccctaagtcacctcgatcacgacacgcaggaattgtgactgtccggctctgcctttgtaccccctccagggaccggccccacctccagggcagggcctagggctgatgccccctcctcggtgcccagcgccaggctccctgcctgccctcagcaggcttcatctcactgaagcaggcccgagtggtggctgctccagagaagccccgctcccaggtccctcgcacaagaagccggaggcgggagagggtcggtcaaggtgaaaacaagccccgctcctccagtcctgagctccggggatctaaggaggctgcgccacggaagaggtggcggggcagagatcggggcgagagggaagggtgtaagcaggcaaagtccagggtaaccagggagaaagactcctggggggccggggaaccggccagagaggcaagagagcggagctgaggctcagggactggggagcgcagctgcagagagcgagtgggaaaaggccgagagcaagagactgagactagggtggcggcggagctgaggtgaagagattaagagactggggagggtcgagggggaagaaacggggtgccgtggagaggaaacccgaaggaaggagggaaaggatccgaagcagaaaagacccgcgggggtcccgagagggaaaagcctgaggggacgcggagaggggaagacgtgggcgcctggccctggagagagagggtcgggcgacgcgggccgctcacctgcgagggggggcggcggctcctcgcactcggggctcatcggggcgcccccccccgccccgccgccggcggctccggcccctgctgcggggcccggtgagtgggggcgggggcggcgtcggggactcgcgcaggcgccggggctcgcggggtccgcgcaggcgcccgcgggtcgtggggtcctcgcgcgccgggtcctgcagagttgagggggtcagcgccgggtggagttgccgacgggcggggggcgtcactagtccgcgtaggcacctccggggtccgcaggcgaggtgggcgtgcgggccgaggcgggttggcgagccgggtcgcgaggcccacgcaggcgcctcagccgggaagacgggggaagttgccccggtttccacagtccaaccgagcgccccacgggaggggaaggcgacctcctccgcggtccaaacgggccgcagagccgagcagcgaccgacggaagccgaggcctacttccttaaccaccccttccccaaagccgctcaatctccgggctctgcggccggcctcagggcctccgacgcccggctccctccgccactatcccacaatccccctagcgcaggacgacgcaggaggccccgccctcccgcggctgtgttggtgcgcaggtgcggggggcggggtgcacgcctgggcggtgcagtgcgcgtgcgcccgggcgctcccgacaccgcccactcttgaaccccgccgccgcagacgcgcttgcgcccgttggtgccaacggtctgccccggaataaacccagacagctcagtgagccgcagctgcgcaccggctccgttccaaggccccgtgaatattccgctccaggatttcccttcccactcgctccgtttggaaatccgttcgctgttctgtctcctctaatcatagtggagctttggctccagggtcgggctcttgcgaaatccagacctggttttcgctccagccaaagccaggcgccttcgttccgtccggctctcgcgcttagccgcctccgagcctcagaggccctcagtcgtttccgtctgctggcgatagtcccggccgggtcgctggtgttgccagttccgcccaaagcagcttctaatagcatcaactgaaagagacctcctagaccttgtgtctagattgatgaaggtccctctggctttgagcctcggtttccccaactttaatagctcccctctctacccatgttagaggcctactgtaaaaatcgtgtgggcgcgaggaacttttttgtttttgtttttgttttaagactccgaattggccgggcgcggtggcttacgcttgtaatcacaacactttaggaggcccgaggccggaggatggcatgagaccaggagttggagaccagcctgggcaacctagggagacccccgtctctacaaaagaaaatttaaaaaattagttgggcctggtggcccgcgcctgtggtctcagctattcgggaggctaaggcaggagaatcgcttgagccgaggctgcagtgagccggattgcaccactgcactccatcctaggagacagagcgagaacctgtctcaaaaacaaagggcccagcgtggtggctcacgcctgcctgtacttgagctcaggagttcaagaccccacgcctataatcccagcactttgggaggccgaggtgggcggattgcctgagctcaggagtttgagaccagcctgggcaacacagtgaaaccacgtgtctactaaaatacaaaaaatagccggacgtggcggtgtgcgcctgtaatcccagctactcaggaggctgaggcaggagaattacttgaacccgggaggtggatgttgcagtgagcccagatcaggccactgcactccagcctgggtgacagagcgagactccgtctcgagaaaaaaaaaaaaaaaaaaaaagagcaaattcacccctcctttgccctctttgttctattgagaccctcaatggattggataatgccagctcacactggggagggaagatctttattcagtctaccgattcaaatgctagtctcttccagaaataccctcatagacacacccataatgttttaccagctatctggacatcccttagcccagtcaacacctgaaatgaaccatcacagagaggcatttccttttctcttttttctatagagatgttttgtcttttacccagcatttggcttccttgttttctccacaatatgatggcatcattgccacactgttttaacacagaggtcaggaactgagggataaggatgtggctatagtccctacccttcaaatggaagctgggaagctgtgggggctttaatgactgaagtctggatttccacccagcagaactcacagatatacattgtgtttgcattagaattgaaacttttttttaagagacagggtctggctctgtcgaccaggctggagtgcatggcacgatcacagatcactgcagcctcgaactcctgggctcaagcaatcctctcgcctcagcctcccgagtagctgggactacaactggaacttttttcttgagacaggatctcagatcctgcagctacctctcaatttatcctggatttaggaagaggagtgataaaaaccaatccaaatagactcaaaaatcccagatccaccagaacaatccacacaaaaggaatgagtctgacatcaaattgtcctag[131 bp omitted]aaacctggtctctactacaaatacaaaaattagccgggcgcggtggcaggcgcctgtaatcccagctacttgggaggctgaggcaggagaatctcttgaactcggagggtggaggctgcagtgagccaagatcgggccactgcactccagcctgggcaacagagtgagactcccgtctcaaaagaaaaaaaaaagaaagaaaaagaaaaagaaagaggaggatcgctctggaattagtccagctgtgaatcctggctgtgaacttggtcaggggtcagcctcctctgagctcagcctcctctctggaaaaacaacagctttcaaagctcttgtctacaaatgacaaaatttcttgtagctaaacagaaaaggaatttattaaaggaattgaggcagcctccgacacccccacctcccgccccaatcccacgtctctgagaaagctacagaatccgcttggcgctttgcagtcaggaatgaagcccacacccagccacaggcctgctcctgagacacagtgcagcctccatcaacggcacctggctcagacactcccgccagaatctctgccagccctgtccagaagccaggtgtggctgctcctgcactagccagaagggaacctgggcaggggcccctccaccgccaactcttggcccgacgaccggcgggctctgattggtagaggagctagaccaccagcgggttctgattggtgtacaaaacagattcccagagagagttctgatttgtggagctaatgtcacatgattaccctacagcaaaggatgctgggaagggaaatggcggctaccctagggaaaatttagatgtctaacctgggaaattcctcaaacctagaattcaggtttgccaggtggccgaaaaaaggacagatgtcccacacactgttgctcaggaaagacagggaagagtaaatgacacaatggctctatagatgataaagagcaacacttttattattcttccagtggctccccaagtcccttaaacccgtgcccctcctcccgtcccccatgcaccctccaaaggagatgacaaaggcggcagtgaaggaggagaaggaggaagagaaacacctttattggaagagctgtgtggacaagagaacggggatgagagtgagagcatgggaggtggggtccaaggagctggtgcctttctcagcgccccttccagggactgcacagagacgggctggcacaccctgggtccaggcacctaggccctgcgatcccttgggagagggccttgtaggtggggagggaggcaagaggcctggggttcccacggagaagggggcaagaagccacctggtttcaccgatccatgctgtcgtccgctgggctggagaaacaggtctgtagcagcttttcacagaactccagctcctcctggattgggcaggggcagggagcaaggggcctgagtgcagaggccggaccctgcctccagcattcttggcacccagaggtgactcctcttctctcctggccaccacccactcccccccaccagaggttaggcttttttaatcactgctcagatccatgattcactgtcttcacactggtgtctgaactacttgaactagaacccggggtcccccagactcgtctcactccattggtctgcctcatatcagcactcttgggctctttctaactcccagatatggaccactgctcaaaactttctgcggatacaaaccccagaaaccatgaaagaaagcactgagaggttaaactacgtaatataaaaaatactcccatggcaaaaaaagaaaaagaaaacgaggttggagaaaaatatttgtgattcatagcacaaatggctaatatacttaactcttaaagagcttaaaaaagtcattcgcaaaaaccatcacccaataaatagataagtgggcaaaggatgagaacgaacagttcacaagaaagagaaaagatgccaaatttcactcatgggagaaatgtaaactggactggagtactacttttcaacaatcagtttgaaaaaaggtcaaatggttcatcgaggccactttgtcctgaccaagatttggggagttgggcaccctcatgactggagtgtcaatggttgaacttctatggagagcagcttggtgatagctaatgaaacggcccttaaccctttaaccttcacctttaacatacctgaccccagccatttcccttctagaaattgttctacagacatatgtaataacatatacaaaaggttattctttcagcagtgtttgtcatagcgagagtgtagaaacaacctgcatatccatgctacaaaaaagagcccatccgcactgtacagctgcaaaatgaaagagccacaggcgagacatgcaatgcccacaaagcaaggggcagaacagccatcacagcacggcaggcttattttgcataacatagagaaaaaggagaattcacatgcacctttgctcgtgtgtacctaatattttaagaaggacacctgagcaactgggtagccagaaggaggggcaggagagagacttttcactgtttaccctcctgcgggtcttgtattttcaaccatgtgactacggaacctattcacaaagcattagtaaaatctgttacaaatctaatttgaatgtttccacgggtgtatacataagtcaaaa[131 bp omitted]ctcagcctcctgggtagctgggattacaagcacctgccactatgcccagctaattttttgtatttttagtagagatggggtt[143 bp omitted]ctacacaggaatgaatctaatagaatataacgtcccaaggaggtgggtgcgtttgctaagctcggctttgctgaagcaccagcattgattcattcacttcaacaaattaatgcattacttaatcagttaactatttgaattttaattagttgtgatttagcatttgttacttatctagttatctaatgagttatttatttgccccttatctaattaaatatctgatgacttgttatttatcacttgttatttacccaaaataattggttattttttgccatttgttatttcttgtcaatttaatgaaatagttaaatcattaagacatttgagtgatattatattcaatttacatttacttaatgtaaaacaactgtattgggtaatttagataataattcaatgattgggcaacactttaagaatctccaagctcctgtctccttgctgtctctcctactctgacacagcacgggacgaatgctaggcatgaaataaacatctgctgaatggaagataagtgaaatgcacgagaacacgaatgaaagcctgaaccagcggacccaggagcccccaagggcaaggactggctggctctgcccctactagggtccccactaccacacttggtctaacctggggaattcctcaccccccaggcccctccccctcacacctggtcctcctcacaccctgtcccttccccaactcacctggtccttctggagccgctgtcccctcccccggcacacgatcctcctcgaaccccatcccctgcccctcacacctagtcctccttgcaccccgtcacctccccgtgtacctggtcctcctggagcccctgtcccctccccctggcacctgatcctcctcgaaccccatcccctccccacacacctagtcctcctggagcccttgtcccctcccccttgcacctggtcctccttgcaccccgtcccctccccatgtacctggtactcctcatgctgctgcagcagctgacagcggtggcggaggagctcctccaggcccagttccggctcccgacactcgcgcacaccctgcggaaagtctgtcaccaggctgtgagggacatgacagcggcccttaggacctccctctagaggcctcactgacccaaccctatcgcccgccccgtcccctggctcactcaggagcctggcaagtcgctgccccacaatgggcctccatttccccatctgcggaatggacctcacgctgcccctggcccagggtgggtgctgaggggctcagcacagggcctggtgcgtgtcaactctggtgtgctgttgagagctccagcatcatctgattagacactaatccactggtgggggcgtgtacagaagcctctctccctcctgcaaggcctctgtgccagccctactggtgaggaaactgaggctccctgactcctgctcctttctggccccacacccttcctctctacgggaaggtcccaactcctgagtccctacgggctgattcctgagccacccccaccttgagaggacggggcccccaccccaggccccgtcctctcaaggagccaaagtacctgcacagggctccaagcacgtgctcgtggaaggggctgtgctctgtccgcaccagggccaccagctgctggaccatccccatggagcacagggtccctggggggagggctgcaggggtcagaggggcagccccacccatctcctatgccctccccgggatgcctgttcctccccttctcccacacctgcacccaccccagggcgtctgctccccactcctgccctcactcaagggctgccacacctttgtgttcagggtggcccaccagcaggttctgcagcaggaatgctgatttgaccttgagcttctgcacctgctgctgcatggccctcatcaacacagagaagccgtccaggcggaggaactgcagcagcccagcctcctgctctcggaccagacctgggagagggggaaaggtcctgagcttgcagtcaccaccaccaccactgtcatcacaagcaccatcaccaacatcatcacaaccaccatcaccaacatcatcatcaccaccatcaccactatcttcaccaccatcacaatcatcatcatcaccattctcatcctcaccaccatcaccatcaccaccatcctcaccaccaccaccatcactatcaccatcaccaccaccaccatcaccaccaccatcatcaccatgacatcaccaacatcaccatcactatcaccatcactatcaccatcaccaccacatcaccatcaccgccatcatcatcactaccattaacaatataattatcgtcaatcatcgtcaccatcatcaccaccaaccactatcatcccttgccatgggcctgcatatgcaagcattatctttttttgaagtatgcttttgagatataattcacaatccacacagttcagccttttaaagatattcacagggttgtataaccatcaccactaactctaggaaattttcatcaccccccaaaggaaacctatgagcagtcattcccaatttcccttccctctggcccctgcaaccacagatatactttcttcctttatggatttacctgtcccagacatttaatataaatgtgtccataaaatacgtgaccttttgtgtctgactgctttcactcagcatgatgttttccaggttcattcatgtcgtaagtggtatcagcacttcattctttttcatggctgaataacattccattgtatggatataccatattttatccattcctccattgatggaagcatcatcttttttaatttttttattttatttatttacttatttatttcattttgagatggactctcgttctgttgcccaggctggagtgtgcagtggagcaatcttggctcactgtaacctccgctcgcaggttcaaactattcttcagcctcagccccccaagtagctgggattatagtaacctgccaccacacccggctaatttttgtatatatagtagagacagggtttcaccatgttggccaggttggtctcaagctcctgacctaaagtgatccacctgcctgggcctcccaaagtgctgggattacaggcatgagccattgcgcccggctgtgtcatctctctcttttttttttttttgagacagagtcttgctctatcatccaggctagagtgcagtggcaccattttggctcactgcaacctctgcttcccaggctcaagctattctcctgcctcagactcccgagtagctgggattacaggtatgcaccactacacccagctaatttttgtattttgagtagagacagggttttgccatgttggccaggctggtattgaactccagacctcataatccacctgcctcagcctcccaaggtgctgggattacaggcgtgagccaccgtccccagtccgcaacatcttttaatcctcacaattatcctggaagtgtgtgctttcagaattctattttacagatgaggaaactgaggcctaaagagccaggctacacagcatgcatgacctttatccagagggcaatgagaactctggaaggactcccagcaggatgagaactgacctttggagtgcacctccagtaaggtgccccctcctgggtaggctctaggcctgtgctggccaagaaggacagaagctgctagtagcttgtggccactaaacacctgatatgtggccagtgcaactaaggaaaagagttgttcatttcatttaagttccattcatttaaacttaaggtgaaaaactgaagcag[212 bp omitted]gaggcaggagaatcatttgaacccgggaggtggaggttgcagtgagccgagattgcgccattacactccagcctgagcaaaaagagcgaaactccatctcacacacacacaaaaagaaaaccaaaaaaagaaaaacacacacaacgttgttgctctggcgcactccacactacccctgaaaactcagcatgttgcgatgtgcttcatttgtaaaatgcacacactaggttttgaagacttagcatgacaaaaaatacagtgtctcattaatagtccatattaattacacattgaaattataatag[148 bp omitted]tcaacctaccgagtagccgagattacaggcatgccccaccatgcctggctaattttttggtatttttagtagagacagggtgtcaccatgttggccaggctggtcttgagctcctggcttcaagtgatccacctgtctcggcctcccaaaatgttgagattataggcatgagtcaccacgcccagccagatgttatttaattaaagaaagaaaaaagaacaggcatgcatggactggaaaacacaaagactcctctcattcaatctgtaagcaaggcctgtcagctctaccttcaaaatgtacccaggagagacctgtcccctttacgccagggtttctccacctgggcacggttggtatctggggccagatcattctgggttgggaggcccgtcctgtgcattgcaggatgttgagcagcatccctggcctctacccagtagatgccaatagtccctctctcccagctgcgacaactaaaaatgtctccagacatttgtctaaatgtcctgtggaggacacgattgtccctgtttgagaaccactgctccctaccacaaccttgatctcttgcctaggttatcaccataaccccccagctcaccgcccaccttccacccaccctcgccgcattcaccctcttctctgtgcagcagttgggggcagggatcacagtatggctgccgtcatttttggaaagaaagccaaagtcatcactgcagcccacacatctcccttaaaaaagttacgcttattcagcgctaaaaagaaatgagctatcaagccaagaaaagacatggaagaaccttaaaagcagattactaagccaaagaagccagtcggaaaaggctgcagattgcatggttccaagcatatgacattctggaaaaggcaaaactatggagacagtaaaaagctcaggggtgggatgactagcgggagcacagaggatttgtagggcagcgagattcctctgtagaatactacagtatggatccatgtcatgatacagttgtccaaacccatagtacatacagcatcaagagtgcgccccagtgtcaactatggactctgggtgacaatgaggtgtccatgtaggttcatcgattgtaataaatgtgccactctggtagactgtaacaaggaaccactttggagtggctccacagagggcgagcgagtccatcccctcctgtcctgggaagggcagtggcaccaccgcctcgggcagcaggagctgaggggacgtaccctgcaaatggctcccagcacggaactccagtaatggtactggacagccacacaatggcataccctgcagccaccaaaaaaaaggacagatgccactgaatggtatactttaacattttcatgtgaattttacccccgagcaaaaaaaagaatggcatccaagctcccagagctcttgccctgcatcgtgcacaactttcgctggggaagccgaccaccacgtggtgaggccgctcacgcagcccgagcttcctgccaactgccagcaaaactctgctagccccggggcgagccatggtggaagcccatctctagcaccccttcctcagagggggattgtgagggatcaatgaggtgcagcgcacagggcttagtgcaatgagaccttcagggaacgaggcccggctgacggctgaccacaacctcatgcaacctcatgcaacctcatgaagacgcaaagccagaagccgccctcctcagcaggggccactgctgcattcctcacccgcaggaaggggaaagataagctactgttgcttaagaaaaaaggacagaggcaggtcaaggtgcgccacagtcaggatggcctgtgccagccgtgcacatctgaggaaacgagattaatccgtgtgtctgtgtgcacacataccacacacgacacactccacataagcacacaccacacaccccgtatacacacaccacatccacacatcccacacacgccatgcacatccacacaccacacatacgcaccacacatacacacctcatatgcaccccacataccccacacatatacatacatccccccagcacacacatcccacacacatacacatgcaacacacacaccacacacacctccacatatataccacacaccacacaacccatgtacacgctacactaacacacgacacgccaaacaccccacatacacaccatacacaccctacacacgcgccacacacccactacacacacacatcacacacacaccacacacacccacatttgttcttacagatttattaaaatctctggaagcagaaacaggtataacagtggttttctctggaatggggaccaggtttggggacagggaccatttgctatgtactcttttgtacctggtgaacgatgtgactgtctcacagatttttaaaaatatgtaatgactttttttttttttagacagggtctcactctgtcacccaggctggagtgcagtggcacgatctcagctgactgcagcctctgcctcccaggctcagatgatcctccctcctcagcctcccaggtaggtgggaccaggtgtgaaccaccaagatgacctaaagacttcttttttaatgcaagctattagaagaaaactctgccagcccctctctaccctgctctggccctcgggacaccatgtccttctctctgccctttgtggccgagctgccccatgtctgtctgtccctgtcaccctagttttggctgtgactttccaagtgcccctttccttgcctcatcagaatgcttccttcttccggaatctcctcctacccaaaccctccctgttctcctcccagcctctgcatggctggggccaccatctgccaggaacacaacactgattccaggactcaggatacatgggggtgagggagagaaagagggtgttggacccccctcacagcccccatttcaatgaccagataggctgctggaattaaaaaatagccaacctcaggccaggcacagtggctcatgcctataatcccagcacttagggaggctgaggtgctcacctgaggtcgggggtttgagaccagactggccaacagggtgaaaccccgtctctctgtactaaaagtacaaaaaaaattagctgggcatggtggcatgtgcctgtaaacccaggtacttgggaggctgaggcaggggaatcccttgaacctgggaggtggaggttgcagtgagccgagattgcgccactgcactccagcctgggccacagagcgagactccgtctcaagaaacaaaaaaagaaaaaaaaaaaagccaacctcgaacagattaaatgtagagttacgatatgacccagcaactccactgctaggtatacacccaagagaacggaaaacaaatgtccataaaaacacctgcgcagctatgtccacaggagcacgagagcccagagatacaaggaaaccagggactgtcagcagacaggcggaggaagaggcagggcacggtggacccacgcaacaggacacattcagccgcgggaaggaacacagcactgccacccgccaccactcggggaccttgcagcatatgaaaggagccaggcagaaaaggcctcacggtgtgggattccgtttgtacaaatgtcccggagagggaaatccttagaggcagtaagtagattcatgttgcaggggctgcgggagaggacggacgccgagtgattgcttaacgggtacagaatttctgcttgggggagaggatgaagatgttctgaaattttggccgggcgcagtggctcacgcctgtaatcccaacactttgggaggctga[133 bp omitted]gaggcagaactgcttgaacctgggaggag[132 bp omitted]ataccaccccgaacgcgtctgatcacatctaaaattagagagtgatgatggctgcacagcactgaatacactaagaagtactacgttgtttttctggtttttgtgtttgttttcagacaggtcttgctctgtcacgcaggctggagatgcaatcatggctcactgcagcctcaacttcccaggctcaggcaatcccaccacttcagtctcctgagtagatggaggtacagtcacgcaccaccacgtccagctaattttttaatttttgtagagacaggggtttccctatgttgcccaggctggtctcaaactcctgggctcgagcaattctcccgcctcggcctcccaaagtgttaggattccagatgtgagccaccacgcctggccaagagtactaagttatacactttaaaaggatgaattgtatggcctatgaattacatctcaataaagctgttagagaaaataaaaggaaagagtccagttggggcgctagtatagcacatgcaggcaggcatccagcacatacgaagagctccaccaggctgggatcctggctctgtgtgtcctctccagaccccctggcccgatccctcccgtgtggaggagacacagtgggcccaacttcagcaggtgtgcataaggattcagcgagtcaacacctggcatggagaaactgccccacagatgttggtttttgtcccgtccctgtgcccgacctggtgcctgtgtcccaggcggcagtatttgggggagtcctggccagctctgccctatggagctgcagaaacctggccgtgtccctctgcccacacctcagtttcttcccctgtcaaatgaggatgcaaacggtccctacttcacaggccattaggataaaaagaatttgtggctggacatggtggatcacacctgtaacctcaacactttcagaggccaaggcgggaggatcccttgaggctaggagttcaagactagcctgggtagcaaagcaagtcttgtctctatataggttaaatgaaaaaaaaaagaagaagaagaattcatgtacagcaggggttctgaccaaggggctttctacatctaggggcatttgtgcgctggcaggtggggtgatagtgtctctccatggcctggaggccacccaccagatgctgctcaatgtcctgtagtgcacaggacggcccccgagagagtgaaccagcgccagtgtgaacagtgcccagctgaaaaactgctgtgtgcaaagcgctcacgctgagggccaggtggtctccccgggaagtggtcacatctgctgcctggctagcagggggtttggccgagtgcgccactcactctgcccgcagcactcagccgtgcaggggtccaacaagcatgggaacaaacgagggaaggagatgcctctccctctgccccagcagatcccgggggcccacccggcacccccccccaccgccagcacccctgtccccagccccacccggacactcacaggagatggcgaagagggccttgacgcgcaccgtgtcgcaggcgtcgcggtccagcagccgcagcagcttacgcagggcacccaggcccagcacctgctcctggatggctgccacgttctgactgcacgtgccgatgagctgtgccgcccgccaccgcagtcccgcagcccccgcctccaggtaccggcccaccagcaggtgcatgccagacagctggcagaagtctgtgccacagaggggagcagagagaggccagatgttagggactgaaccgtgccccccaaaatgcatgggttgatgttctgacccccagtaccttggaatgtgactgtttttggagatgggatctttaaagagatcattaaggtaaaatgaggtccttagggtgggccctaatgcaatctgactggcgtcctgataagaagaagagatgaggacacagacacccacagagggacaacatggagggaggacacaaaaaatgccttctgcaagccaaggagaggggggctcaggagaaaccagccctgcccacaccctgatctcaaacttctagcctccagagccgtgagaaaatacatttctgtttttaaagccagtagtctgtggtgcttggctaaggtggccctaagctgaccactacagctgctgaggccgggagagccaggccggctcccacagggacgcagctctctccaaacacccaaccagaggtccccccaaggctagtacaactcgattccatcagcatttggggcattagggccccaggctccagactactaaatgccaggactgatcctggtctttgtgacaatctgaatgtccccagggtcagcaaaccacagcccacctcctgtttttgtaaataaagtggtattggagagcgtggcagttcctaaaaaaatgaaatacagattccccgtgacccagcaattccgcaccaaggcacagacccaaaagaaccagaagtagggactcagatacttatatactcaagttcatggcagcatcattcataaatgacccaaatgtccttaaaggataaagggataaatataaactgctctagccatacaacggagtattactcagccataaaaaggaatgaagcagctgggcgtggtggctcaagcctataatcccagcactttgggaggccagggtgggcagatcacttgaggccaggagttcgagaccagcccaggtaacatagcaaaacagggtttttgctatgttatatactaaaaatacaaaaatgccaggcctggccaggtgcggtggctcatgactgtaatcccaacactttgggaggccaaggtgggtggatcacgaggtcaggaattcaagaccagcctggccaacatggtgaaacctcatctctactaaaaatacaaaaattagctgggcatggtggtgggcgcctataagcccagctactcagaagggcaaggcaggagaatcgtttgaacccgggaggcacaggttgcagtgagctgagatcgcgccattgcactctagcctgggcaacagggtgagactctgtctcagaaaaaaaaaaaaaaaaaatttgccaggcctgatgacatgcacctgtaatcccagctgtttgggaggctaaggtatgagaatcactgaaacccagcaggtggaagttgcagtgagctgagattgcaccactgcactccagcctgggagactgactcaaaaaaaaaaaaaaaaaaaaaaggaataaagctctgacacacgccacaacatgggcacgccgcctttagcacaatcagccagacacaaaaggtcacgttataatcatctatatgaaatgtccagaacaggcaaattcatacagccaaaacgctgattagtggttgccaggggaccgggggagggccggcctaatgggtgctgggtctcctttgcaggcaatggaaaagttctggaaatagaggtggtgttgcacaacattctgaattgactgtaagtggtataaacagtcatatgggaggatgttcccctcagcccaccttcatcagcactgtgcatcttcattaagacagagaagatacacatatatatttatatttatatacacagagagcgcacgaggccagggaggaagtggtatctttggctttcgttctcatttgattactaataaggtgtaaaattgctgctgctgtgatgattggacactcagcacagtgcttagcacacagcagctgctcaacagatatttcctgaacaagcaaaaaatgaatgaaagagcaaagtcgttaaaagccatcctgcggattggagcaggagttctctgcccggataagacggggagacactggggaaaggtaagctagagggtggcggctgcactgcaggtcttctcggggtgctgcatgcgctcacagaggagggcttcccaaactccgtccagcccctgtccaaaatgaagacacctgactcccaggcctgacacgttacgtttactctgtgcctggtgttgtgcgggcctgggggtttctctcggcccagcctgcgtacaagaggaagtaatcaggacctgcccaaaccagactgccatgtagcagcacagcctgaactatgaaccaaggaagtgacaccccaaatccacaccctcaattgctacaccacccaacccctccaaatggaagtgagctctcctcaaaccttctgtgagctctgctgcttggagtaaaacagcatttacctccccatctgcgaggcccaccccagcgctgtttcctgcgcctggcccctcactcactctactctgcctcaagggcctggctgctgttcctgaacacaccaggcacactctggcctcagggcctttgcactggctgttcctactgtctggaatgcttttcccagagatcatcccacaactctcacctcacttcaggtctctgatcaaacgtcaccccggggaggccttctctgccaccccacccatgccactttccctcttgtactctggggagtggcagtggacacccagaggactaggagagaaacagccatctcagagctgatcagggaagtgggggactccacctgccatgagggtgaggcagagccttgctccttatggcaatggaggcgaacaggctgatggtgagaaggcagcagggaggctgacggtgtgagccccaagagtaggggcaagagctgagaggcagcaggacatgtacagaggggcagaacgtcctggcgggggaagcggggtacctgcggcattgtccatgttctcacacaggtcggccagcagctccagggccccctctcgctcttgctggtcggccgcctgctcggcctccccagcagtggggggcatgggctgtgacagcactcggaggcagctcttcatctgctccacctcctcccgctggcctcggaaggcagccgacatggcctcctgcagccactgacgcctctggagaccaaggcgaggaggaaagaaggagatccatcagtcattcattacaaaggaacagccattaataaagacagccaacaactgag[212 bp omitted]gcagcaaagggaatcgcttgaacctgagagacagaggttgcagtgagccaagatcaggccactgcactccagcctgggcaacacagtgagactatctcaaagaaaaaggagatgagagctaatacgtgactgctggaatttttgggggtgagggaggggagcagaggtctccttagtcacagttctaagtaaatttgagtgagctatttaatgtttctgtgcctgtttcatgcctcactgttgtaaaggttcaatgatatcatatatgtaagtgggttagcataatgctctgtatacagtaattgtcgattaaacattatatataatagctatcgctatgaatctgcaaaacaactctatgaggtatatatcattgttatccccacttcgcagatgagaaagttgagtcacagaaaggttgagacttacccaaggtcacacagtcagcaattggcaaagcctgaaatcaaacccaagcagtctaggctgggcgtgctggctcacatctgtaatctcagcactttgggaggccgaggcaggtggatcacttgacgccaggagttcgagaccagcctggccaatgtagtgaaaccccttctctactaaaaatacgaaaattagccaggcatggtggcccatgcctctaatcccagctactggggacgctgaggcatgagaattgcttgaaccgggaagtcagaggttgcagtgagccaagactgcgcctctgcactccagccgagactgtgtcctccacccccaaccctgcccccaccaaaaaaaaaaaaaaaaaacagcagtctgactacagagcctgtgctcttcatgaaaacacactgctgccttcagaagcactgtctgtatgctgggcactgtgtgcagccctacttaaagtagaacctcagaactaccctatacggtagttattattattatcaatttgtaaatgaagaacttgagattcagaaagatgaagtaatatacccaaggtcacacagctggaaatgctgaatccaggttagtctggctctggagaggatatgtcccctcagactctcttgagatctgaccttcagtcaacgataaccccatctagcacaatttatagcccacaatgcctccacacctggttttctgcctcccacccaagaagaccctagtcttcttgtggctccccaagtcacacttcccaaggcaactctatctgtccccaggcccctcaccccagcttcttgggtccccatcctttacctcctcactcatcggttctggaggagggtctggctcttcagagcccgcggtgatggccatctgcagcaagccttggaggttgcgtgggggccgggaattgcccgagcccccagccgaggagccgccgccgccgccccctgaagagcaaccctgggaggccgggggcagcgccaggggcaggcggctcccccttgagccttcgtctgacatgggccgtttgtgaagaagggaagaatgtgttagagggagaaggtggtcaccgctgaagcagctctggcgtcctgatgggtcgattcttgagggtctgctgagaaggcggcgtttcaggggagctcggcgaccccccatgaccccaaaccactctgcccccagcccacttaaccacagccccttttccttccttcatacccacaggacccttccccaaagtcataagcctctcctttctccctagcaacaggccccacccactctccctggcaacaaccccccttccccatctccactgcgtgcgtcccgtctcttagcaacctcactgctccgcctccgtagcaacaagcccgccctttggtctccttagcaacaagtcttctccctcctctccgaagaggggcgccggaataaggcggatctcacctccccgggtcctcaagccgccgctgctcctacagacaaagtcgtccgcacctgactctgctgggcgccgccatcttaaccggaaatacgcacggtttcacccggaagtgccaggcgtacccacccaacttcgtgccgtggttgcggctgaagctgcttgcccgactcttatccccttctcacctggcgggatactgcactcggccccgcccctcccatccgggccccgcctccaagctgggacgccccttcgtgcgggcgccgccccttcacgctcaagtagctggtcaaagccctgcccctggcccagttttcgcacctcagcgagtcccgcccccgatacttttgcaagctccacccctcttctaacgtgtgccccgcccccaggtctgaccccgcccaccctacgattcccgcccctgctctaggcctttcagactctcccagttgggccccggcccctttacaggcccctcccactcattgctgtcagtcatccttagaaggtttgggacctcgccccaactaatctgactttcgcctccaccggggccaccaaccccatctacaggagccctggggtcgcaaccgtaatggctggcctgtgagccttatgccccccgcaacccctctctcggcctcagtttctccatctgtcaagtggagctgcggcgtggatccctctcatcacccagcctctccctcatggactcttccccatgtcctgccaggtggagaggagaggattcttgaggcctagagccggaaagcaaagtgccccagagcccagcaagattcagagcgccagaggagccagcttggtggggaggcccgaggcctctgtgctccagaagtggggtttaggcctgggcacgtgctggtgcgggccgatctgcagaggtgttggccctgggctgggcttaaagaaactcccgtgttgatcctggataggaggcgttttcctccaggaaaaggttgtgctcaacgcaaaacgggcacacagtcacaaacgtatcaatcacctgctgggcgtggttgtgcagggggatattttgggcagaaacaggaagaccaaacagataggttgtgtgtgtatgtgtgtgtgtgtgtgtgtgtgtgtgtgtgtgtggtgtttctagcactgtgctgtgagatgcatctgggcctgtggatgtgctattatattagtttcctattgctgctgttaacaaattactaagaatgtggtggcttaaaacagcacacatttattatcttgcagttatggagggcagaaatccaaaatgggtttcacggggctgaaatcaaactgtcagcaggattgcatcacttctggaggctctcggggagaatgtttttcttgccttttccagcttctagaggccacactctttctttgacaggtggccccatcaccccaagttctgcttccaccttcccatctccatcactgactgctcctcctgcctccttctcacaaatactcttgtgattccatcgagctcacccaaataactgggataatctccctatctcagtcacatgggcaaagtcccttcagccatgcaaggtaacttatgcacagatcctgggaattaggacacggacatctatgtacaagtctatcagtttataatacatggccgggggcagtggctcaggtctataatctcagtactttgggaggccaaggtgggaggatcacttgaacccaagagctcgagaccagcctgggcaacatagtgtgtccccagccctacaaaaaaatacaagaattagccatgtgtgatggcatctgcttatatcacagctaggcaggaggctgaggcaggaggatcacttgagcccaggaggtcgaggctgcagggaactatgactgccctactgcaccccagcctaggcaacagggggaagaccctgtctcaaaaaacaaaacaaaacaaaaaaaagagggtgatcatataatttttcatctatagcaagacatttgagagcaaaaagggactcaatagttacagaaccaggccaggtgtggtagctcacgcctgtaatcccagcactttgggaagctgaggtgggcaaatcacaaggtcaggagtttgagaccagcctgaccaacatggtgaaaccccatctctactaaaaatacaaaaattagccaggcatggtggcgggtgcctataatcccagctactcgggaggctgaggcaggagaatcgcttgaacccaggatgtggaggttgtagtgagctgagattgtgccactgcactccagcctgggagacagagcaagattccgtctcaaaaaaaaaaaaaaaaaaaaaaaaaaaaaaaaaaaaaggctacagaaccagcctggctaacagggtgaaactccatctctactaaaaatacaaaaaaagccggacgcctaaaattgtaccctgctcaacaggcccctcttaacccccttccctgctgtagtcacctcctcagcacggacatgattatctaacacaccatacattttgcctattgaccttgctgatcatctgtttcatccaccagcatggaagctccacaggacaggcctttttgctgatttaggtcactgccacgttcttaccaacaggaacagtgcctggctgagatttggcactcattaaagatgtgtggactcaaggtgttgaatgggggactgggaaatctcacaggagccaataggctcctgtgtgcactttattttattttatttttgttagagacagggcctcactctgttgctcaggctggagtgcagtggtgcaaacgtagctcactgcagcctagaactcactgactcaagcctcagcctcccaagtagctgggactacaggcacatgccaccatgcccggctaatttttaaaaaaatttttgtagggatggggtctcactgtgttgcccaggctgatcttcccacctctgtctcccaaagtattgggattacaggcatgagccaccttgcccagccctgggtgtgctttacaggggacttgagaattaaatgggtgtctaacacttgcgggtacatgacatagagggatctatggtttatgcggaaagctaatgggggcaggcgggttactcacaggcagagcacatgcttgtggacctgctacagtggggatgtatgggctgtactggggtccacatgaagatataaaggaccctatgacgagcacagagaatatatgggggtctaaaaacataacacagggaaactgagggggttctggaagcttctctgtaaagagaatccaaaatcactctgggctgtgggtagatatggggccttgacattggtggggacacagacttacccttaccctgaatgggtggccttagggggctggggaaacagacatgaattttgggtcagcaactccaagaattctttcccctctctgtctctgtctccctccatatgtccccacctctccccagcacgtgtccctccacctgtgtgtacccccggccctctctacagctccatctgcgccccctctcccccacctctctggttggtcttcctctctctgtctctctgaatctctgactctctccatccctctgtcggcttccagcagctttctctccctctccctgtctgttttcccggcttgccattccttccttctcttctgtccctgtccatctctgcccttcctccctctctgcctcagcctgtctctggtggtctccatccctctggcgtctctgcctgtctcccgtctctgtgtcagccagcatctctctttgtgtatctccatctctgccccatctgttgggtcctctctctctctctccatccttccctccatcctctctcctgcatcctcccacctcctctccatccctccagctggaggcccgccccctgccccccctcgctccccctcccccctccgaaagggttaactttggggaagggcccggagtccccggatggtgatgtcagcgtgccggagagaaaggacgaggtggcggggggaggcggagaggaggaggaggcggaggagagagggcgcgtgggggggcgggggggacctcggcctgcagcatccgccggcccgcacctcagacccccccggcggggggaggcgcaggaagcggggggccggccagaaacgggctggggagggggggccccgcagcccccctgggccatgctgactcccggggcctgacccccccgggccagccccccctcccccagctccgcggcccgccgactggggggggccagcccagccccctggggacccccggagaggtggggggcagccgggggggccgggacggagcggtcgccggcccccaccggagagacggggcgacggccgcagggggggcggccgggggaccggtcgggccgggaccaagggcaccatgtcgtccggggccaaggagggaggtgggggctctcccgcctaccacctcccccacccccacccccacccaccccagcacgcccaatatgtgggcccctatcggctggagaagacgctgggcaaaggacagacaggtgagcctagcagaaggggacacctggggcggggggcagggtggaggtggcggcagaggcgggactcagggtattcaaatggcaggggctggctgcccagacccctgggcccctcatagagaagggacttgggattcagactcctgggtccctggatggagggggtggggggcgcagactcaggtcctggaggagaggggctgggggcctggactcctgggtctgagggaggaggggctgggcactggactcctaggtctgagggaggagggcctgggggcctggactcctgggtttcagggaggagggcctgggggtctggactcctgggtttcagggaggaggggctgtgcttggactccggagtctgagggaggagaggctggtggcctgcactcctgggtctgaaggagaagggcttgggggcctggactccagggtctgagggaggaggggctgggggtctggacttctgggtctgagggaggaggggactggggtcctggacttttgggtttgagggaggagggactgcggtcctggactttcaggtctgagggaggagggcctgggggcctggactcctgagtatgaaggaagagggtctggggtctggactcctgggtctgagggaggaggggcaggggtgctgaactcctgggtctgaaggaggaggggctgggggcctggactcctgagtctgagggaggagggcggtcggaaccttgagtgttgggacagggagtttggggccccagtgctccagtccccataggggcagaggctggaggggctccagggccagggaggggatggaggcggcctgcagagtggggccgggctgggacctgaggttcttgctgcagtacagctgcagaccggggtgcagtgcatccatcctgggaaacctcttccctccccactgtcctctggcctccagttctccaggcagcaggttggggtgacaggggccgtggggcctaagacattctccccttctctggcatgctggctcagagtgggaaacaggatggagggtgggaaggtgggctgcagcaggcgcgtctcctggagcggctgtggaaagggcgttcatcctctgctgttgctgaacgctggccaccggccgcggcctccttcctgccggatggatggtgggtggaggtgacatgggagctgaacgcccagagtctctatgaagctcagggccagagctggcaggagtggggaccgactgggccgtaactgggagctgagaccctagggaaaaggagagggtcaaagtcccagatcctgagtggtaagagtgtgaaggtgttgctgacctgaattcctgagttacaggagaagaaggggtcagacctggactgggtctgagggaggaggggctgggcctggagtgctgggtctgagggaggaggaactgggggtctggagtgctgagtctaagggaggaggggctgggggtctggagtgctgggtctgagggaggaggggctgggggcctggagtgctgggtctgagggaggaggggctgggggcctggagtgctgggtctgagggaggaaggggctgggggggctggattcctgggtctgagggaggaggggctggggtctggactcctgggtctgagggaggatggaatgggggcctggactcctgggtctgagggaggaggggctgggggtctggacgcctgggcctgcagctttaggggctagtcagggctaggtctgtggctttgggggctcaggtcctggagtcgagggtcctgaggagaggtgtgggctaggagaccggacatacccttggtgtctgtgtgctgtctgttagggctgccatgaagagaagacccaggaaggcagttgaggctgggggttcaggagaaggtggagggtgatctggggaggggcaaatgtgagattatattcactgggaggggattcaggaggaggtggagggtggtctggggagggggcaaatgtgagactatattcgttgggagtcatagggtctccaaaagattgaaaagcagagaatacaaggaattgatggagagagacagagaaagtgggggggcgggggcttggaggagacagactcggggagacacggtgaggaaagaatgcgtggcaggcgggctccccaggacggagagggtgagggccagggggtggctggcagaggagaggggcacctggctggatggacagtcaggaggaacggactggcaggagggaggggaagggtggttttgtgggagtgtgggctctcagccccaggagttcaggtctgatgtgttcaggccattgttaaacagccagcccaggaggaaggagcaaacagggtggccaaggggggacataggcgctggggacgaaggggacccggcggaacaccccacattttcaccctgctcctgcagggctggttaaactcggggtccactgcatcacgggtcagaaggtcgccatcaagatcgtgaaccgggagaagctgtcggagtcggtgctgatgaaggtgtgtgcgcctgctgcagtgtgcctgcgggtgggggggcctccggggctgagggcaggggcggggccgtgctgacctcttttcccgtgtccccacccctcttgaccctcaggtggagcgggagatcgccatcctgaagctcatcgaacacccacatgtcctcaagctccacgacgtctacgagaacaagaaatatttgtaggtatttatagacacccagccctaccccatcctccctctccaggttaccagggtgggacttctccagaaacagggcctagggggacctgggggacctgcagctctccaggctggaccgctgaaggcccagttccttgcctgttgcacagggaagcccctgacacacagggaaccccactgttgtcacgctgtgttgggcctgaggccaagggcaaccatcctcctaccgtgtccccagctccagctcctcgccctgtggcactgcatggaatgcgctctgctagacaagcagggtgccctcgaccagacccaatctgctatgggcagatgcctcctgtttgtaaggcaaggggcctagcaaagcccaaaggatcttcccaaaccccaactctggagcactggagagcccccctcctcccccggcataacttcgggtgccgtggctggacaccccaacaatgggccgccttaggaggtctgagtcactatctcaaagtcaatcacccgccaggaaggatgggggtgggggtccagctgtccagactccagagaatgggcctctttgtccaaactctggtgacccaaaggacagctgggctgggaagccggagaggggacagccctcgtgttcccccccggcacccagtcccccggatgaactgacatcaggtccgtcgatgctggcgcaggtttcaccacacgggaagctgtctgcccggcgctcatgggacctgctctcaggctttcccaggtgtggtggtagggaggggctattgtccggaccggtgcatggtcgctcccactccactcttggcgtagggaggcagggccatgggagtttatgcttcgggcaggaatcccagccatctaagagctcatagaaattgagcttttggggccaggcgcggtggctcatgcctgtaatctcaacactttgggaggccaagatgggcggatttcttgaagagctcgagaccagcctgagcaacatggcaaaaccccgtctctacaaaaaatacaaaaattagctgagtgtggtggtacacctgtagtcctacctacttgggaggctgaggtgggagaattgcttgaacctgggaggcagaggc[131 bp omitted]ccgtgtcccagaggcttatgggaagggagtttgggggtttttttgttgttttgtttttttgagacagagttttgctcttgttgcccaggctggagtgcaatggctcgatctcggctcaccacaacctccacctcctgggttcaagtgattctcctgcgtc[133 bp omitted]cggcctcccaaagtgctgggattacaggcataagccaccgtgtctggccagaagtgggggtttttaacttctaggcgctgatgggagttgtcgtctattgcctcacagaagctggcttggactggtgcaaccttgcaatcgttaatactcgaaaatgaattcaaatttgagtttcctcactccagagggaattagaggcttggctttctaggggctaataggagtaggggtatcttcacttcccagggtcctataagaattggggtctttgaccttcaggtgctaatagagtcgccttatctcctgaaaccattatgagtcaaagtgttggttcccctctgaagctgacatgggaggctctactgcccagggctaatgggacttgagtttggtttcctagaggctggtggaaactggagtcacttcctcccagggagtgatgggaactggaatctcttcctcccaggaattaatggaaactggagtctcttcctcccagggacccatgggaattggagtctctttctcccaaggatcatgggaattggagttctctgccaccaggagccagtggaagtgggagaccaggccctttggtcctccacatgccccttccagccctctgccccctctatatcctttaggtacctggttctggagcacgtctcggggggtgagctattcgactacctggtaaagaaggggagactgacgcccaaggaggcccgaaagttcttccgccagattgtgtctgcgctggacttctgccacagctactccatctggtgagtgggcagcttgagggggaggaggggctgagggctgcccagcagacaggcccttgggggcatgtggagggctgagcaaaagccatgtggtcggcccccaaacctttatcccattgagacataactcatacaccagaaaattcctccttttagagtgtgtaattcagtggtttttgatatatttgcagtggtatacatctgccactgtggaattttagaacattttctcaccctgtacccattaagtaagcagtcactccccattcccctcctgcccccagcccccggcaacctatgttctgtctgtatggatttacctattctagacgttttatataaatggaatcatacgatacatggccctttttgtattgttttgttttgtttttgagatggagttttgctcttgttgcccagcaggagtgcaatggtgtgatcttggctcactacaacctctgcctcccaggttcaattgattctcctgcctcagcctccggagtagctgggattacaggtgcacaccactacacctggctaattttgtatttttttagtaaagtcggggtttcaccatgttggccaggctggtctcgaactcttgacctcaggtgatctgcccgcctaggcctcctaaagtgctaggattacaggcgtgagccaccactcccggcctctttgcccatctttaattcagttattttttaaaatttgatttagtctttttattattgatttgtaacaattttttattctaggaacaagagattactctaggaacaaaattattcctaaaaattattctgtatgatgacagcaagaacaagggggaaaatttaacaaagaaaaaaagaattgtttattctagatgcaagtctttcatcagtatacatttttaaattattttctccaagtctgtgccatgtttttacatttttataagtcttgtgaaaagcaaaagatttttcattttgataaattccagtttgttgatttttttattttacacctcatgctttttctttttctttttttttttgagacggagtcttgctctgtcacccaggctggagtgcagtggcgcgatctcggctcactgcaagctccgcctcccgggttcacgccattctcctgcctcagcctcccaagtagctgggactacaggcgcccgccaccacgcccggctaattttttgtatttttagtagacacgggg[135 bp omitted]gaaacttttgcccaactcaaggtcactaaggtcttctgtatattttctagaagttgtatagttatagctcttgcatttaggtctggcatccatttcaagttaatttttgtatatggtgtgaagtaagggttgagtaagggttatttatttattcatttatttttagtttagtttagttattgagacagggtcttgctatgttgcccaggcttgtctcaaactcctgggctcaaggcatgagccactgcgcctggcctatgtgtccacttttaaagattttttttttggctgggcatggtagcacatgcctgtaatcccagcactttgggaggccaaggcgggcagatcacctgagctcaggagttcgagaccagcctgggcaacaaagtgagattccccccatctctccaaaaaataaaaataattagctggatgtggtggcgtgtgcccgtggtcccagctacttgggaagctgtggtaggaggattgcttgagcccaggaggttgaggctgcagtgaggcaacagagtgagaccctgtctcaaaaaaaagaaaagttattatttttttcattgaattgactttagcctccaaatcagatattaaatgtgcaacgtttttctaactgttcaggtacaaaatgaatgccttcatcttttagcctccttcatttgcgcatctctctcactaagatgtgtttttggagatggggtggggatcacggtagagggactcagactttgggtaaagcttgatgataaaaaggccacctacttaaattttcggtttttgtctttttttattttttgagacggagtctcgctgtcacccatcctggagtgcaatggcacgatctcagctcactgcaacctccacctcccaggttcgagcgattctcctgtctcaaccttccgagtacctgggactacaggcacccgccaccatgcccggctaattttttgtatttttagtagagatggggtttcaccatgttggccaggctggtctcgaactcctgacctcaggtgatccacccacctcggcctcctgaagtactgggatgacaggcttgagccaccgcacccggccctgtttaaattttccacaccttcctgttgacaagattgtcaaaaccctgatattgaaaccctggcctctagggggagatattcaacgtatttaacaagtttgacccagttaatgaccaggccaaatgaaaactgcagaatcctacactccctctctccccagacaccaacccttaaaccttgaggagtttggttcaagggtgggaaggtcccaagacaggaaccaaggattttaagaaccagctgcatatcagctttacctcaaaatagctcactttgtacatattcaaatacttacagataaactaatatgacatctgggatgtcctacaaactaatttgggttggggaggagtatgtaagggacagagatgagatcagattggccctaagatgatcatggatgaagctgggcgatgggtaagtgaggcttcctcttactttctctccagttttgggcacgtttgtgattgtctattataaaaagtttccaggccgggcgcggtggctcacgcctgtaatcccagcattttgggaggccgaggcaggtggattacctgacgtgaagagttcgagaccagcctggccaacatggtgaaaccctgtctctactgaaaatacaaaaattagctgggcgtggtggcacatgcctataatcccagctactcgggaggctgaggcaggagaattgcttgagcccaggagacggaggttgcagtgagccgtaatcgtgccactgcactgcagcctggtcgacagagtgagactctgtctcaaaaaaaaaaaaaaggaaagtttccaaagccagacatggtgatgcacgcctgtggctccagctactcaagaggctaaggccagaggatcacttgagctggggaggtcaaggctgcagtgagctatgactgtggtactgcactccaggccgggcaacagaaagggaccccatctctaagcatacacttgatcttagccaaaaggccgagaagcaatgcccatctctaaaaataaaaaacaaaataggccgggcgcggtggctcacccctgtaattccagcactttgggaggccaaggcaggcggatcacctgaggtcaggagttcaagaccagcctggccaacatggtgaaactctgtctctactaaaaatacaaaaattaggcctggcgcggtggctcatgcctgtaatcccaggacttcttgaacccgggaggttgtggtgagccgagatcacgccattgcactccagcctaggcaacagagcgagacttcgtctcaaaaaaaataaaaatacaaaaattagctgggtgtggtggcacatgcctgcaatcccagctactcaggaggctgaaacaggagaatcacttgaactcaggatgcggaggttgcagtgagccgagatcatgccactgcactccagcctgggtgatagaatgagactccatctcaataaataaataaataaataaataaataaggctgggtgctgtggttcacacctgtaatcccagcactttgagaggccaa[131 bp omitted]aggcaggagaatcacttggacccaggagacagaggttgcagtgagccgagatcatgccactgcactccagcctgggagacagagcgagattccatctcaaaaataataataataaatacatacatacatatgataaaaaattaaaaatttttaaaaagaccaaaattaatgaatgataataaatggtctctcatcccctaaaaatccaaaaagtatgcagaagtgttccactgtgagagccagtcagtggggcctgggcctcctgggaggaaggaagaggcctgagtcccacctggctgtctcagccacagagacctaaagcccgagaacctgcttttggatgagaaaaacaacatccgcattgcagacttcggcatggcgtccctgcaggtgggggacagcctcctggagaccagctgcgggtgagtggggactgggctcccgagaccctgggcaggggtttagaagctggctggaggctcacatcagctctctccctcaggtccccccattatgcgtgtccagaggtgattaaggtgagtgaggggcggatagaggggagaggggtggaggcagcagtgaggagcgatgaagtcacaactggccttcccttccagggggaaaaatatgatggccgccgggcagacatgtggagctgtggagtcatcctcttcgccctgctcgtggtaaggcgccctcacctctcctgtcatttctagatcaatcccacctggtgggagcataggacagtaccttccatcctcaggtcatctcctgaatttatttatgaattttatttatttattttgagacagagtcttgccccgtcgcctaggctggagtgcagtggtgtgatctcagctcactgcaacctctgcctcccagcttcaagcaattctcctgcctcagcctcccaagtagctgggattgcaggcgcccaccaccacttccagataatttttgaatttttagtagagacagggtttcgccatattggccaggctggtctccaactcctgacctcaggtgatccacctgcctctgcctcccaaagtgctgggattccaggtgtgagccactgaacccggcctatttatttatgtattttgagacagagtcttgctctgttgcccaggctggagtgcagtggtgcagtcttggctcactgcaacctacgccgcccgggttcaagctattctcctgcctcagcttcccgattagctgggactacaggtacctgccaccatgcttggctaatttttgtatctttagtagagacggggtttcaccatgttggccaggttggtttcgaactcctggcctcaagtgatccaccctcctcggcctcccagaatgctgggattacaagtatgagccatcgtgcccggcagct[131 bp omitted]cctcagcctcccgagcagctgggattataggctcttgccaacacgcccagctaatttttgtatttttcacagagacagggtttcgccttgtttccctggtcggtctcaaactcctgggctcaagtgatctgcccacctcagtctcccaaagtgttgggattacatgcgtgaggccaccgaacccagcccatctctcgaatatttcactggtaatgggaaagatactacattaaccaacagaccaagatcctggagttcccccactctgtggggagctaaccttttcattcacagaactgtgggttaaaaagataaaagaactatgggatagtctccaggaagaaccccagaaaggaacaagtcatccaggagcacctggagggcttgatacaatgactgtttaccagctgattctagggcattgtgatactgtaataacaagtataaccaggccgggcacggaggctcacacctgtaatcccagcacttcaggaggccgagcggaggcagatcacctggggccagaagtttgagaccagcctggccaacatggtgaaaccccatctctactagaaatacaaaaactagccgggcttggtggcgcatgcctgtagtcccagctactcaggaggctgaggcaggagaatcgcttgaacccaggaggttgagtttgcaatgagttgagatcgcgtcactgcactccagcctgggcgacagagtgagaccctatctaaaaatatatatatatagccagatcgtaggctatcagccctgctcctaccacagggcctttctgcctgggacactctgctacctattagccttgttgctcacctagttcatatctagacttcttcaagctctctgctcagttgtcacatttccaggaagcttcccctgcccccactcctcctccccactcctgtaaggtcagacccccctgtggtaggctcccttcttcctggcaacgatcagagttgtcgctgtgcattttgttgcctaattcgttgagtggcatctcccttcccttctgtatcatcaactccctgaggtcagggccgatgtctggggcatctgtctttgtgtgttttatttcattttgctggcttgcctttgcaaacctaaagttgacacatgtaagtccccagtgaacacctgtagtgagaataaatcagcagttgtccgggcgcaatgactcacgccagtaatcccagcactttgggaggccaaggtgggaggattgcttgagcccaggagttcaagaccagcctgggcaacatagcaagcaagaccccatctcaaaagaaagttaagaaagtagccaggcattgccgggcgcggtggctcacgcctgtaatcacagcactttgggagg[138 bp omitted]gaggca[137 bp omitted]tgtagtcccagttactcaggaggctgaggtgggaagattgcttgagccctggaggtcaaggctgtagtgagccatgatcatgccaccgaactccagcctggatgacagagtgacacctcgtctcaaaaataaataaataaataagtaataagtagaaaagaaaaagaatacataagtttttttgtttgtgtgtgtttgtttttgagacggattcttgctctgtcacacatgatggagtgtagtggcgccatctcggctcactgcaacctccacctcctggattcaagcgattctcctgcctcagcctcccaagtagcagggactacaggcatgtgccaccacgcctggctaatttttgtatttttagtagacatggggtttcaccattttgtccaggctggtctcgaacttgacctccgcccgcctcttcctcctggagtgctgggattacaggtgtgagccaccacgcccagccataagcagtttttttaatgtcaggcactgttctgatcatgttatttcacacaattccctcagcagtcccagggaggggaagtgactggcccacgggcacgcagctgataagccgcaggcctggggtcagtccttggtctcttaaccaccaggctacataacggatactaagggcaatgaggccagctccaagctggcttcctggggctcaccactccatggggagagcagccgaggtgctctggagacgagctaagaatgttcagaactcagcccttcttcacttggtggctaaaagcctggttctggagcccatccagccgagttccaatccctgctccctctccctgagcgagccagtcaccctacctcagtgtcctcatctgcaccgtggaaatacacatcatacctatcattgtaagggttttgttttcatttttattttatctatttattttttcattttgagacggagtttcgctcttgtcgcccaggctggagtgcaatggtgcgatcttggctcactgaaacctccacctcccaggttcaagattctcctgcctcagcctcccaagtagctgggactacaggcacctgctaccatgcctggctaatttttttgtatttttagtagagatggggtttctccatgttggccaggctggtctcgaactcctgacctcaggtgatccacccgcctcagcttcccagagtgctgggattacaggcgtgagccacttcccccagcccactgtgagggtttaaataaatgctgcacgtgaagcccctggcacaatgcttgatgattattattagtagtttattcttttttttttgtttcttcttttttttttttttttttttttttttgagatgaagtcttagtcttgctctgtagcccaggctggagtgcaatggcttgatcttcttcgcggcaacctccacctcctgggttcaagttatttctggctaatttttgtatttttagtagagatggggtttcaccatgttggccaggctggtcttgaactcctgacctcaagtgatctgcccacctcagccttccaaagtgctgggattacaggcatgagccaccgcacctggcctagtagtttattcttgttccaatagttcctcatcatttgcagattccatatttgcaaatttgcctacctgtcaaaatgtatctgtaacccaaaatagtcctggaggtgctttcacagtcattggcagacatgcccagagcaggggaaacctgagccgcccacccaaggtgcaggtttccggctgaggtcaaacaaagtgaccctgtttcagctctcatcctgtaaacaatccccctttcaccacctatttcgtgtcacgtttttcacatttttgtgttgttggtggcaatttcgttgtttaaaatggccatgaagccaagtgcttctgaagtgccgtctggtgttcctaagcgcgggaggctgtgatgtcccttctggagaaagcccctctgatgggcatgctttgttcaggaatgacttgtagtgctgctggcc[135 bp omitted]gccaatcaggaggctgaggcaggagaatcgcttgaacccgggaggcggaggctgcagtgagccgaggtcatgccactgcactccgggctacagtgctagactccgtctcaataaaaaaagaaaagtgtctttaaacagaaacacatacaaacaaggtcatgtaatgactggttgacaaaaatgtgacgagagggtcaaaggaagcttactaactatagttcctccagtagccgtgactcgttcactagttgagagtttgcagtgactttatagaacagaactctcaagaataacaagaatcaactgtattgttgttataatttgttttggtttttttttttgttttgttttttgttttttttgagatggagactttctctgtcacctaggatggagtgcagtggtgtgatctcggctcactgcagcctccgcctcctgggttcaagtaattctcctgcctcagccacccgagtagctgggattacaggcgcccgccactttgcccggctaaattttgtatttttagtagagatggggtttcaccacgttggccaggctggtgtcaaactactgaactcaagtgatcctcgccccttggcctcccaaagtgctaggattacaggtgtcagccaccatgcccagcctgttgttataatatttaatccagaccgtacccttcctggcaggatcattatgtccgtttcacagaggagaggaaactgaggctctgtgcttgagcatcaggcaaccagaagtcaaacccaggcttccgcaccctaagatcggcattcagaggtgccttctctgtatctccccattctccgtccacaggcctcagataccaggggcaactgggagcttgcaacacccggaaaagccctcaaaggctcacaccatcacctcccatgagtctttgtccatggggggtcaccttggctcccctccaacccttgccctggtgattggaagcattccctcccgtcccgtatgatacgttcgcttgtttgtttcctgtcccctctggaatgcaacttctctgctcattccaccacctttgctgatgacttgagtgtcgagtgtgtgtcaggcagcgtcccaggccaactccaggagggcagggatgtgattttgtcccctgcttcatggctggtggctacgtcagaatgcaggatgtggtggggtctatggtcagtgcgtcacagcagccagcctgtaacagtcctgactgtgggcccagcactgtcatgtactaggtcagttcattctgatgcagtccgtgaggtgggtgctgtgacgacccattgccattttcagagcagtgacttgcctgaggtcatgcaggtataagccccagagcaaggattcaaagcaaggcaggggaccaggtgcggtggctcacacctgtaatcccagcactttgggaggctgaggcgggcagatcacctgaggtcaggacttcaagaccagcctggcca[137 bp omitted]catggtgaaaccccgtctctattaaaaataaaaaaattagccgggcatagtggcatatgcctgtaatcccagctactcgggaggttgaggcaggaggatcgcttgaacctgggagaggcagaggttgcagtcagccaagaacacctcattgcacatcagcctgggcgacaagagcgaaactccatctcaaaaaagaaagaaagaaagaaaagaaaaggtgtcagcagggccctgcttcctctggaggctctagggaaggatccttccttgcctctcctagcttctggtgtccttggcgttccttcagttgcagctgtatcactcccatctctgcctccgtcatcacatgactgttctctgtgcctgcgtcctcgtctcctcttataaggacaccagtcattgatttagggctcagcctcattcaggtctctgctcccattgcacctcctgggagaagcctcactcagtcgctcgtcattgtatagctatttgtttggagctgtgcaagggcagaggcctgttttgttcactgctggatccctgacctgtaacggatgctcaccttttgttgaatgagtgaatgagagacaaccgtttcgaaactgctgtggggggaaagctgtctaaaaggaacagcctccacgctgcaattctagcttcgtaagcggggctccaagctgctccttgccaagtgcctgctgtgccacggacgagctaggggcctttggcaaattgctgagcctctctgtgcctcagtttccaaccccttaaggtggagatcaccgtagttccccacctccagtgcttgtggtgagggtgaaatgtgctaatgaggggtcctggttatctcttgcccagggggctctgccctttgatgacgacaacctccgccagctgctggagaaggtgaaacggggcgtcttccacatgccccacttcattcctccagattgccagagcctcctgaggggaatgatcgaagtggagcccgaaaaaaggctcagtgtgagttgagggggggaccggcggaggggggaacagtggccgatgaagacagaaccccctagaaaagtcatggggatgggtttccagaacctgctcgtcagtccccagggtgactgggatcgccagctgagccgcagcccaaggtccagcacagctgccgctccaaactggggagggggctacgcaagattggggcggggagctccaggcagcgggagggcgcaggagtaaggaggcgaacaggatgccactgcgcatgcggcaaagtaatgcggccggtccggggtacacggagaccgcgcgtgcgcggggcgatgcactcagtcgccactagagggcgatgtaatatgtcatcctgcccccggtggggtgggcggggagatgatcagggaccccaaaaccaccccagtctttcattgcgcgcctacatgtgcctacgacctcacttctgcttctctacgactcaccaccctcacagctggagcaaattcagaaacatccttggtacctgtgagtatggggtaactggactcttgggtccctggcggaaataggggaggggccaaagcagtagaagcggctgggaggggtgggatgccagggttcctgagaggcaacgggctagggactcggacttatgggtcctgggggaagaggacacagctagagaaggagtctaggggtcagaggcaggaggggctaagctaggagtccaggactcccaggtttgagggaaaaagggactgggggcctggactcctggatccgagggaggaggggctgggggcctggacttctgggtctgaagaaggaggggccgggggcctggacccctcggtcggagggaaaaggggctggaggtctggactcctgggtctgagatggggggcgaggtctggggcgtctggattcctgggtatgagagagaaggggccggggcctagactcggatttcggggtccgggatcattgagtctagaatgaagaatgctgaatctcagaagcccggttcccaataatgtttctccacttccccagaggcgggaaacacgagccagacccgtgcctggagccagcccctggccgccgggtagccatgcggagcctgccatccaacggagagctggaccccgacgtcctagagagcatggcatcactgggctgcttcagggaccgcgagaggctgcatcgcgagctgcgcagtgaggagtaagaccccaagacccctgcacccgtgtacccacgtggggcgagctgcagcagctccctgcgcacatgcagagtgctgggcgaggaaccctggcctctcatggggcatggtttgaagctcccgcctgggagtgatggaaccagcggagaaaacggcccagaaacacgctgagaaagtattaatagatgctgcgacatagtacttacatatacatagtacttacaaatagttcttgcctggatgttaggtgttacagtgttattataattgagtgaaacacagctgagatgtaccctaaaccagagaaactgaccatactgatacctagaaaaaatggaaccatgggcagaaatacagggagcggaggagacctcctctgagcattgatgttggacctcagccctctgctacctctttccacctttcccaccccctgccttagggagaaccaagaaaagatgatatattatctgcttttggatcggaaggagcggtatcccagctgtgaggaccaggacctgcctccccggaatgatgttggtgagaaggcagggctaggggaccagacacctgggtctcgagattggaagaggctggccacggggaccccagattcccaaggaaagaaggggctgcaggctctgagcttccagctttagactgcttgacttgctctttgacatttatcaaatcccctctccactctaggcctgtttccccatgtgtgcagtttctgaggcagttgtacacagctgggtgaaaccatctcttgattgggttgaaactgttgtccctcagaccccccccggaagcgtgtggattctcccatgctgagccgtcacgggaagcggcgaccagagcggaagtccatggaagtcctgagcatcaccgatgccgggggtggtggctcccctgtacccacccgacgggccttggagatggcccagcacagccagaggtgggagcccctgtccctccaggaggatccacaatccctgggtctaggagttcaagattctaaccccagctctacctcaaatgtgctgtgtccttgggacaattcacctcccctctctgggcctcatttcctcacctggaaggactgtagaagtgagggaacatctgtggtttttgaaaccctcccatctgattttttttttttaaatctatcctggaaacagatcccgtagcgtcagtggagcctccacgggtctgtcctccagccctctaagcagcccaagggtaaggccaggtccccagtgggatttaagaaggagaaaggggtggagacatggagcaaagattgagtagcagaaactacaattcctgtgcagtcttgagacttgcttctttgtccctggagggccaaagacccaaggcctccaaagtattttggtccattggccatttctacctccttaggattgcatgcctgaagagattttacaaaagttagttgagtgcctgctgtgtactagtatctgcaccggctgggttttcagcccacagcatgatagaaagtctttgctatccttgctctggggcctgggaaggaggatacttggactacaagttgcagcatgcaccgggccagcgtccgtgagtgtgcgtgtgagtggggctcctagagcctcctgggagttgtagtccactcgcttatctcagtctcctgtcctctgcagagtccggtcttttccttttcaccggagccgggggctggagatgaggctcgaggcgggggctccccgacttccaaaacgcagacgctgccttctcggggccccaggggtgggggcgccggggagcagcccccgccccccagtgcccgctccacacccctgcccggccccccaggctccccgcgctcctctggcgggacccccttgcactcgcctctgcacacgccccgggccagtcccaccgggaccccggggacaacaccaccccccagccccggcggtggcgtcgggggagccgcctggaggagtcgtctcaactccatccgcaacagcttcctgggctcccctcgctttcaccggcgcaagatgcagggtatgggggcatgaactgccgagtcctaatgtggggagaggttggggctaaaaatctggttccagggatgtccgtctggcgtgtctagagaggaagggactgggggcctggattcccacgttctagagaagagggggtttgaagcagaggtgcacctgttggggagagaggtggggcctctagctctggaggaggaccccgattgaagggcacgcgcctttggggctctggattacctcccattggcccgtggtttgtgagccccgcccaggagggatggcttggccgaggctgcaacccaaggctctggaaccctgggagggggcgagtgcaggcctgtgtgctggcaactgggatgatgcacaggtgttgaccacgttctctgccttccccctaccagtccctaccgctgaggagatgtccagcttgacgccagagtcctccccggagtgagtctcacagggaaggaaagagtggggatgcaggggattcatgccctcggcgccttcctaaccctcctccaaccaccccctcccactcaggctggcaaaacgctcctggttcgggaacttcatctccttggacaaagaagaacaaatattcctcgtgctaaaggacaaacctctcagcagcatcaaagcagacatcgtccatgcctttctgtcggtgaggggcctgggtccccatcgagcctggcccccgcagaactacaagtcccagcagcccctggggctaaccaccttagcataggcctggcttcctcctggggctcatgggatttgtagttttatggccagagttggttagaagtcggtaggcaggaaagatttatcgtggccagaggcctggaattggggaaataggatcctgaattgcaatgtcctcaaggattggtgagttcccattcccctactgcgaggtttgaaactagccgaagaaacttcccaggcaatgttaaggctgccccattgctggtctgtggttttatgcctacgggtggatgggacttagagtttctgtgacagatatggctatgggaagcatttgtaaagggagcaagcagtgtttcatgtggtcttggagtctgaggctgtcacctagctatcagagtcctcatgatgttagggggatgtccaaccattcctcccttactcgctgataggatagagaaagctacaagtccttgcaggcagtggggcctcccaatgcatttcctgtccttctttccctccagtggctcatgggactcgtagttccttggccagagctggtcgtggggctgggtatccatttcctgggctcaccccttcctgtgttcctacctcgctcagatccccagcctgagtcacagtgtgctgtcacagaccagcttcagggccgagtacaaggccagtggcggcccctccgtcttccaaaagcccgtccgcttccaggtggacatcagctcctctgagggtccagagccctccccgcgacgggacggcagcggaggtggtggcatctactccgtcaccttcactctcatctcgggtgagtctcttggctaggctgcctgcagcccagtgctgggactgttcacgacagctgagacagtgtaggggcccaggagtgcagcagcaggaggaggaaatggtgttcagctggtgccgactctctgtgctcctcctgcccacacagaccgccccacaagcccatcctctatttccccactctcatcagcatttccctggcatttacagtgtaaataatgaatgcattatctccttgaagcttccaagcagcctactgaggtgttagtaatcacccattttacggaggagaaaactgagtcatagggaggtcaatggacttggccagagtcacacaatacactgtcgcagagctgcagcccaacccaggcctcccaacttcagaggagagagcccagctcttcctattactttaagatggtagagccaaagggtgaagacacagcacactgctgtctaatatcagtctgcccagagcagacattaccaattgatggcagtgcttattcctgctaagctcagtggcagcctcaggaacttgaactccaggcagccatgaccagtcgaggcttggcacaagaaaggaaaaccactaaaataccttgcttccagttctgctttctgtttggtccctccatcctgatagtgagcatttggatagggagggatatcgccgatctctttgtcaccaatattaatatgtcacaggtgggagaggggcttgccccaaagatttctaaaccaaacggctgtggaactgtgggtgttccgtcaccaaaaccaatt[139 bp omitted]cctgtctctactaaaaataccaaaataagcctcgcgtggtggtgggctcctgtaatcccagctactcaggaggctgaggcaggagaatcgcttgaactcag[141 bp omitted]atgatggctgactcctgtaatcccagcactttgggaagccgaggtgggaggattgcttgagcccaggagtttgagaccagcctgagcaacataatggacctcatctctacaaaacaaacaaaaaaatttatacacacacacacacacacacacacacacacacacacacacaatttaaaaaaaaaaaaaaagcccagcacggtggcatgcacctgtagtcccagctactccagagtctgacgtgggaggatcacctgattccaggaggttgaggctgcagtgagccgtgatcgcgccactgcactccagcctgagtgacagaatgagaccttgtctcaaaagaaaaaagaaaaagaaaagactttctccgatttctttttctttttttttgttgttgttgttgtttggttttttttttttttgagacagagtcttgctctgtcgtccaggctggagtgcaatggcgtgatctgggctcactgcaacctctgcctcctgggttcgagagattctcttgtcttagcctcccgagtagctgggattacaggcatgcgtcaccatgcccagctaatttttgtatttttagtaaagacagggtttcgccatgttggccaggctggtctcgaactcctgagcaacctcaagtgatctgcccacatcggcattccagagtgttgggattacaggcatgagcccctgtacctggctccaacttatttttcttacatttctggtccttcatggcctccgctagaaactaacagcaagcaatagtatctatttgaatagaaaccaacacctgttatttgaagttgaaggtatgtgagtttgaccgtgatccttaaatagcagcacagacccatttgcaaaccgtggattgatgtggccccagcggagcaggggagacggagatgcagggggggtgttgtgtgcttggtggagggactgggttctgcaggctgggacggccttcccggtcctggacccccagtcagtgtttttctgcccgcctgtgcctctaggtcccagccgtcggttcaagcgagtggtggagaccatccaggcacagctcctgagcactcatgaccagccctccgtgcaggccctggcaggtgggtggtggggccgtgggtggtggggggcgtgggtggcgggggccgtgggtggcggggggcgtgggtggcggggggcgtgggtggcggggggcgtgggtggcgggggcggtgggtggcgggcagaggtccagcatgagcaggtgctctggggtttggtttgcagaggacgcccagctggtgggctccttcaccattgtcgtagctgaggtcttatctgcagagttgtgagcaggttccccgagaggctggggcctgaggagggtctccttagcaacctgaggactggctcccaggagtccctaagaagatgacaggctctgtgttgggggtcagggaacatcctgccaacagaggttctggacctctgtccaggaggacggtgacccaccgtcctggtttgcttgggactgaagggtgtttctgggatgcagggctttgagtctaaacccaggacaaattggtcaccatctttgcaggtctcacaagtcacctcaccctggggctagggcctaatggtccctagcaaccagaattctaagctgagttcatgggaatgtgcaagatcttgctctggggaatccggccttcccgggctcccagtcctggtcatcaaagactcaaattctctagcaatcaggagagcagagggtttgttgcaaaggtgtcttagttcgttcaggctactataagaaaataccatacactgggcaacttacaaataacagaaatttattgctgacaattctggaggctgggaagtccaagatcaagctgccagcagcgttggtgcctggtgagagctgcttcctgggtcacagacagcacgttggtgctgtgtcttcacatggcagaaggggcaagggaactctctggggcctctttcctaaggacactaatcccattcatgaaggccccaccctcatgacctcatcacctcctaacataacctcctaataccatcaccttgggattgggtttcagcacatgaatttgggaggatgcagtgttcagtagagagcataaggggcactcgcccaagcaaccagaggtagccagaattctcaagggaagagagcgcctgccctggaaatcagccctcattcctgagacacggggtcacaggggacacagtgaaacagggtactgggccccattgcagggcacgtggacagccgtctgctctgaggggagtcaggcagcatcagcctcacaggacccatgccccttcctggacccctggaccccgttgaaaggaaacggcccagcgttgaggccaggagccagggcagctttggccttgtcaccagaaactctgagtcccagggtcaggtcttttgctctggagccgtggttctcaactaggggagctggtttcaccccgtgtttgttttctatggccgccgtcaacaaatgacacagccttggtggctgaaacaacacaagtgattttcgtacagtcctggaggtcagaagtcccacatggtctctgcaggctaacagggtgcctggagggctgcacctggaggctctctggcagagactgtttccttgtgtgttccagttcctaggcgctctggttaaggcccgttcctccatcttcaaagccagtgacgccatatatccctctgactgaccttagctgggaaaaggtgactcagtgggacctgcacagatactccaagataatcccccaactcgtggtccctcaccttccccacagcacaggatctcttctgctgcatcaagaaacatagtcacaagttctcggtatttgcatgtggacatctttggagggggccgttattcagcctagcccaaccccctagggacatttagtaatgtctggagacatttttcctcccctcaactggggaaaacagggggatgccaatggcctcttgtaggtggaggccagggatgctgtaaaacaccctacaattcacagaacagccccccacgacagctgggtcccaaatggcagtcgtgctgaggtgcagaaaccctcttttctcatggttgctaggggcaaccggaaagcaaattaggtccactggaccccgttgccgaggaaagctggcctcagcaaccaggggtctcaaaacgggcacaccctggaagatgtaggactaacaggcaccctggggggctcagccaccatctcataaaggagaatggggtggggggtgcaggcctccgagtcaccgtggttgctatgacaagccccccagtttttgtttttgtttttttgagacagaatctccctctgtcgctcaggctggagtgcagtggcgcgatctcagctcactgcaacttccacctcccgggtttcaaatgattctcccgcctc[134 bp omitted]cagcctcccaaaatgctgggattacaggcatgagccactgcgcccggcccactcagtttctcttaaaagaaaaacgaggtctccgccacgggacctcaggtaacatcctaggccccatggaaattgctggagaccacccagcaaccagtgtttccacctcagtccccaagaggaggtggcctcaggacccaggagacagtgacctgagtcaggctggcccagcatgaggggcctgagacccccccgactccaccagtaggctcccttgagcccagttccatggaacatttctccctaacaaccagggtaggagagagtcggggggcccctcttgctgtgaacgttgagcaccgtcctggcaggctgtttcctagcgaacagtatcataaccagaatctgagagtctcctaaagtcaggcccggcccaggcccccttggactaacctggccccagggttgcagggggcatagggtgcagcccccgtcctaggggagtcaggccttgccacttggggtgtgtcctccgagtaaccaattcaaggccaggtgctggacggactgggccttatcagggattggagctagagcctcggggttactgagaccgactgatgaggagactctgcccccatcccctggtaatgggaaccccaaccctgggctgcggaacccacgaaaaacctcttcctcccttgcagacgagaagaacggggcccagacccggcctgctggtgccccaccccgaagcctgcagcccccacccggccgcccagacccagagctgagcagctctccccgccgaggcccccccaaggacaagaagctcctggccaccaacgggacccctctgccctgaccccacggggccggggagggaggggacccccctccaccccccttccgtgccccccaactgtgaatctgtaaataaggcccaaggaacatgtcgggaggggggtggacacaaaaaccggccttgccctgcagggatggggctccacaggccgtgcccaactgggggtggttctaggggaacagggggcgggggagctgtttctattttatttattgattaatttattattttatttattgatcaatctctctgcggggtggggtgggggagggacgggagctggttggggtggcttagcagatccggacagggccctctgtccctgtgtcgtccccaaccccctcttcccgggcccctcctcccctggtcctccccccacgaccttctgtacggatttgctctccggaaggaattctggtttcgcgtgatcctgcctgcgtccgtgtctctgattccgccggcggcaaaaaaaaaaaaaaaaaaaaaaaaaaaaagataataataataaatagccttgatcagggacagctggctggccttggcctctcgattcctgggtgcccagttgcaggggcagggcccgaaggcggggacggggatgctggctgccaccagctgttcagaggccctccgcgccggcacacaggtcctccggctccaggtcagtcagcggcagccccagctggttggagagatctccagtggctcatcttgctgggtgcggggcactgggattggccccatctttcctgcttcactggtgagggcaaggcccgggtcagggtgcctgctacagctggaccggcagggagatgggggaggccggcggggggctgaggctgggccacggctgaacacacagggtgcagctctccagggcggagaagtcaacggctaagagaccgaagagcgcgaacagcagcatggccacgacccactcgcaggccgcagagacgctacgcagcgagcaggcgtggaggacgatcactgccccagggtcaagggccacactgctaccgtgacagacgcggagcccggcctggtctctgtgccgcctcgcgctgggcggaggccgtctctgggtgtccccatcctcagctctccccttcccccgtagctcctcacagacggggcctcgccttggtctccgatgctctccagccggtctccatctcaagctgcttgcacatgctttcctttgcgtgcacccccgttactattgcaatcctaatatcctgaaatgtttctgtctcccttccctgacccagggaagggcctggttgcctccctacttgtccaggacatccagctgccattgctcctgcctgtaaacatgcatggtttcctaaatacgcctccctccctgccgccagcctcggactgtgttttgcaactttctcctgaacatccaccccgctacccatggcctacaggcccttcctgctcactcccagagcctaatctcttccctgtaaaatctgtttctctgagtgtcccctcctccacgacaactccaccatccactcatgtgccccagcagacactcccccggccctctcttcatccttcttggccagctggtcaccccaagtcttgtcctatctgccttacccatctctctccagccctctcctcatgtcttgtgcctttctctcctggtctgtcccgtccctcctctggttctcgcaccctgctagctccttaagacctttttctgctctgccagcccctgcagactccaggcctagtagagacagcatttgttttctggaacttctctcactggagctgctcaccacttcacccctcccagacagcttattccattcattcagggatttctaagggggctgagaagtggtggctcacgcctacaatcccagcactttgggaggccaaggtgggaggattgcctgaggctaggagttcgagaccagtctgggcaacagagcgagacctggtcttttttttgaaacagagtctcactctgtgtcccaggctggaatgcagtggcgtgatctcggctcactgcaacctctgcctcccaggttcaagcgattcttgtgcctcagcctcctgagcagctgggactacaggcgtgtgccaccacacctggctaatttttgtatttttagtagagatagagtttcaccgtgttggccagacaggtcttgaactcctgatctcatgtcatccgcccgccttagtctcccaaagcgctgggattatgggcatgagccacaatgcctgaccgtaaacttcctatggctctctatcacccccaggcagaaacccaagcctctgatccctaattttagagaatcctcagccctggccctgccagcagcctcactcctccctgggctggtctttctgctcggtgcgtgtacctgcagtgtgccctcaacctcccagcccacgagcagctccttctgcaaggccaggctcagaatccggccaggctcaggcccgtctttacagacgtccatcccttacgacactcagctagctgtctttatggttccctcccccacctaccccacccaagagactactgagtcccacagaatgaaggcccctgtggctaaactgatcatcagggctagtttagaagatctgggctggatcttatcaccatcagggcccctgcaaaggagacctaatggtctcataccccaagtcactataggccgggctgaggggccagccctctcaactattttgtgaagatacactttgtcactccaggaaatacgatcaccatttccattttgctgagaaaatttccaagaaacggatgcacttaatacaaccaacacagggccttagctggtttctctgtactctcttctgaatgcctgcacactctgggcctccccacaaatgagaaagaccccccaaggctgggttttcagcccctcctttctctcactcta[135 bp omitted]accccatctctactaaaaacacaaaaattagccaggtgtggtggtgcatgcctgtagtcccagctacttgggaggctgaggcacaagaattgcttgaaactgggaggtgggggttgcagtgagccaagatcatgccactgcactccaccctgggtgacagagtgagactccatctcaaaaaataataataacaagataataataataataggccgggcatggtggctcatgcctgcaatcccagaactttgggaggccaaggcaggtggatcatgaggtcaggagttcgagaccagcctggccaatatgatgaaaccccgtctctactaaaaatacaaaaggccaggcacggtggctcacacctgtaatcccagcactttgggaggccaaagtgggcgcatcacaaggtcaagagatcaagaccatcctggctaacatggtgaaaccctgtccctactaaaaatacaaaaaattagttgggcatggtggctggcgcctgtagtcccagctactcaggaggctgaggcaggagaatggcatgaacctgggaggcggagcttacagtgagccaagatcacgccacttcactccagcctaggtgacagagcgagactccgtctcaaaaaaaaaaaaaaaaaaattagccaggtgtggttggcaggtgcctgtagtcccagctacgtggaaggctgaggc[131 bp omitted]caaatccattttatggatatggaaactgaggcctcagagagtgacctgacccatctagaagtacactgtgctggtggaaagtgcctcggttctggggatggctcagaaatgagttggaattgagtcaagcctcatgtggtgtgctagtaaatgtttaacaactggctctggttggtggcatctgccaattacagtggtataaatactcccatgatggctatttcaagctactcacatgatatcacaggacatggagttcggacgagcagttcacagaatgcctctcagagcctgcgcaagccacctgcagcctatcaccagctccattgcagaacctcacgcgcatcctggccgaaagacttttcctgtctgaacccgtcttcactcgtaaccacatgattcctggcacagagcaggtgccctcaagggactgttcttagtatatcattcttccagcgtctattggtcactcgctatgtgccaggcacagatctaagcaccgtatgcctattatcctatccactccacaaccctgaggtcagccctgtcgttatccacatttgagggatgacgaaaccattgacaccgagaagtaacagcccgcggaagtttcccccagctgctgtgtggaggacaggggcttccaacctgggcaacctgaccccgaagtcggcattctcgatgacaaagccataatcctgtgcaaagagtgaggcccagagaaaggaagagacatccccagtgacagacagccaggcaggaagaccaactccagtgaagagccacctccaagccctaccccggatacaagaaggatactggccacaatgaggatggtgcagacgctgcagaggcccaggcggaggggcccaatccaggcagccccgggctggggcagcctcttcagcctccacaggaggagctgcagccagaagtagacgttacccaagatgaaggcaaggaaggcccctgccaagtgcgtaggccgctggttcttttcctgggaggagaagggagaagttgggagggagactctgggaaggagggtaaggggcaccagaggggccagggcccttcaccaatgcagtagacagtggtcaccaactttccatacccagtgatgggcttattaagcacatcagctattgtcagctccacgagagcaggcattgaaatctgttgttcactgctgtggcctcaattcctagaacagtgatgggcacatagtagatgctcagtaaatatgagtgggataaatcttgcattctcaaggcgggggacagacatttccccaaaaattggtcttgcaggtgaaaaattcttaaatattacaattgtatgtgactcacggatacatagcacatattccattaaaattttaaaatacttaaaattttggcctggtgcggtggctcacatctgtaatcccagctctttggaaggtgaagcaggcagatcactttgagctcaggagttcaagacccacctgagcaacatggcaaaacctcgtctctacaaaaaatacaaatattgccaggcatagtggctcacacctgtaatctcagcactttgggaggccaaggcgggtagatcacttgaggtcaggagttcgagaccagcctggccaacatggtgaaaccctgtctctactaaaaatacaaaaaattagctaggcgtggtggcgggcacctgtaatcccagctacttgggaggctgaggcaggagaatcacttgaacccaggaggcagaggttgcagtgagccaagatcgcaccattgcactccagcctgggcaacaagagtgagactccatctcaagaaaaaaaaaaatacaaatattagccggtcatggtggctcaggcctgtaatcccagctactcaggaggctgaggctggaggattacttaagcccaggaagcagaggttgtagtgagctgagatggcaccatcgcacaccagcctgggcaacggagcaagatcccatctcaaaaataaataaacaaataataaataaataaaataaatacttaaaatttcatgggaagaggggagaaccagggggaaatgtctaaaaatactccttagaggagcaagataataataataggttgagggctgggcacagtggctcatgcctgtaatcccaacacttagggaggccaaggtaggcagatcacttgaggtcaggagtttgagaccagcgtggccaacatggtgaaaccttatctctactaaaaatgcaaaaagtagccgggcgtggtggtgagcgcctgtaatcccagctactctggaagctgaagttaggagaatcacttgagcccgggagatggaggttgcagtaagccaagatctcaccactgcactccagcctgggccacagagcaagactctgtctcaaataaataaatagttgtggagcactttgggaggctgaggtgggtggctcatttgaggtcaggagttcaagaccagcctggccaatatggtgaaatcccatctctactaaaaatacaaaaaaaatttagccaggcctggtggcaggtgcctgtagtctcagctatttggtaggttgaggcaggagaatcgcttgaacccagcaggcggaggttgcggtgagccaagatcgcactactgcactccagcctgggtgacagagcaagactccatctccaatatatgtatatatataaatatattctctgtggtccatgggcaatgagtgacctagctagagtcttcatggagatggaatgaagtcatgtacaaaatggaaagcctgctgccaatggctgccaaatgctcaatcaatgtgcctaacatgaagaatgagtaaatctcagtcatttctttttggagacaaggtctcactctgttcaccaggctggagtgcagtggcacaatcacagctcactgcagcctcgacctcctgggctcaagcaatcctccatcttcccacctcagcctcctgcatagctgggactacaggttcacgccaccatgcctggctaattctttattttttgtagagacagagtcttgctatgttgtccaggctggtcttgaactcctgggctcaagcctcagcctccaaagtcctgggattacaggcatgaaccactgtgcccagcctcactaatttcttttttcttttcttttcttttttgagactgagtctcactcttgcagcccaggctggagtgcaatggcatggtctcggctcaatgcaacctctgcctcccgggttcaagcaattctcctgcctcagtctcctgagtagctgggcttacaggcacctgccaccacccctagctaattttttgtatttttagtagagatggggttttaccgtgttggccaggctggtctccaactcctgacctcaggtgatccacctaccttggcttcccaaagtgctgggattacagccgtgagccacagagcccggccagtaatttcatcttcttcttcttttttttttttttttttttttttttttttgagagaagtctcactcttatcccccaggtttgagtgcaatggctcgatctcggctcactgcaacctccacctcccaggttcaaatgattctcctgcctctgcctcccacgtagctgggattaagtcgcctgccaccatgcccggctaatttttgtatattttaggagagacggggtttcaccatgttggttggccaggctggtctcaaactcctcacctcaggcgatccgcctgcctccgcctcccaaagtgctggaattacaggcatgagccactgcgcctggaccagtaatttcatcattaaataagctggggagaggggctggcagaaaattatcccaacgtcctggaagtcaacgaagtcctacatacaaacagcctcgctcgtagtgccccactcagagagcaaaggaatccagccggtccaaggccactggccagagaaaaatacaagtcccaggagggccgggcgggaaccagcccccgagacaataagcctatggccacggggcatgctgggagttgtagttccagacgccggccgggacagaccctgggcgccgactgggtctcacctggaaattgcctaccacggaggtgcccagggcacacagaagacccgtccataggatcagctggttaggccaccttctgacgccccagtcccggagctggtggtaacggacaatgcagatccacgcggctgggagtagaggggagaaggaagtgggagggagacccaccaagaactcctgggacccagggagggaagtgaggggagcaaggtgagggagaaagtggcaaactcccggattttggggaaagaggggcctggggcatggactcctgggtttgagaaaggagcggtttcggaactcgcttggctgggcttgggagcactgaaccaaagggctgggcaatatttacccagagcagctcccatattgagcacctggctgaagatgcagctctgaggggggaaggatccgcagatgctggggaagacaaaggggtcatcctgggcaatccaagctagggcctccactttcctgcagcggcgatccccccaaatccctaccctcgggcagaattacctgatgtagggaaagcctttactgaggtccacagtcctgttggtcactgcaatggcaaaactacggaggaaatcagagtgagtgggcgactctcaccaacaacttttccttctgttaaccaaacaaacaaggacttctagccccctccaccctcagaccaggagtccaggcccccagcccctcctccctcagacccaggagtccagatcccccagcccctcctccctcagacccaggagtccagacccccagcccctcctccctcagacccaggagtccaggcctccagctcctcctccctcagatccagggatccaggcccccaaccccttcctccctcagacccagaaatccaggccccagccccctccaccctcagacccaggagtccatcatgcctctgacactcacacgatccagacgccagagatagcccagacagctaggaagacaggcatcagcgacaggtagccccacatgccgggctctgcaggtgaaggatcggggctgaggctggacacctgtctctctcacacctgaagaaccagccctcaaggagggcccaggtgcatgagattgtggccccaaccactaggccccgcttggctctcaggcagaagtcacctgtaggggtctgatctgattggccagctctccatttccaggcaatttccccacctatcccgcagtgttcaaccctatctcacgcattctcctgcttgaggaatttctccctgtcctcccagcccctccttgcacctcccagcctctccttgcacctcccagcctccaggacctcctggagatgctcacctctccaagatccctggggctctcagtcctgggactggggctgggtgagcttagggaagaagggctggcattcgggatggggctcagacaggccaaggcagaggcaaagtcccagctggagcgctggagggctgcctggggtcttgggtctgaccaacacttcctgaggggctctctacctccaaaccgccatgtcctccctcctcagaacctagcaggcagcaccttagcttcaggggcccctaacttccttcctccagctttgtgggttcaacgtccaaagtctcagcccttccctccccaggaaccaggaatctgagcctccagctctctccagcctggaagacccagaattccggggccccagttcctcctagaatacagatattcttctccagctcctgatgtccaacctcccagctcttacctactcgggtacccaagagtgagggcctcaggtcggcctgctctctgggtgaagcttctgttttggggctgggagatatggagcactgacaaccctgcctcctcccctccactctccttcctctcacccttctccttttgcctgctggagttccccaggcaggctgagcatgggtgggaagggagctttcagcgatgacatctccatccgaaaattcccccagccagacaaagactgctcctgccgcctgacccttttccttctctctcccaacagccatcttcagcttctgacctcctcctggcttggtatttagggatttggagtcatggcctcttccttcttcccaggacccaggagtccagtccctcagcccctcctccctcagacccagggtcagacctctaggccctccttccttagactccggagtccctcctgcctctgacactcacgaggtccagaccccaagatagcccagccagcagggacagggacaggtaagcctcacatgctgggctctgcaggagaatgagaggggctgaagctgggcccctctcgctttcctctttctctctcctccccttcacacctgaagaaccagccccttggggagggcccaggtgcatgagattgtggccacggcctctgggcccccattggctctcaggcagacgtcacgggtgggggtctgatctaatcggccagctgtcctccactccaagcaatctcttcacctgtttcagtgttcagtcctagctcacacattctcctgcttggggagtttctccctgccctcccagcccctccgtgcacctcccagcctccagggcctccccaggatgctcacctctccaagcttcctggggctctcagtcctggagctggggctgggtgagctcagggaagaagggctggcattcggggtggggctcaggcagacatcctgcagaggcaaagtccaggctgcaggactgcctgggtcctttggtctgactgccacttcctaacggctctctgtccccaaaccaccgtgtcctgtctccttagaacctcacaggcagcaccgtagctttgggggaccctaatttccttcctccagctttgtgtattcaacatccaaactctcagccctatcctcccctggactcagatcggagcctccacccttggggacccaggagtccaagctccaactccttcctccttccccaaaatgcaggagtccaggcccccagaactcttcccttagacacagaagtcccagccacctcctctctcactatgccacctcgtgtcttttaatggacataaaatccacataacattagccattttaaagtgtacgactcggccaggcacggcggctcacgcctgtaatcccagcagtttgggagaccaaggtgggcagatcatctggagtcaggtgtttgagactagcctggccaacatggtgaaaccccatctctactaaaaatgcaaaaattagctgggtgtggtggcgggagcctgtaatcccagctactccggaggctgaggcaggagaatcccttgaacctgggaagcagaagttgcagtcagtccagatcatgccattggactccagcctgggtgacaagagcaaaactctgtctcagaaaaaagaaaaaaaaaatgtgcgactcagcgacattagtgcactcccaatgttatgcaaccatcgcctctttctttttttttttttgagacagagtctccctctgtcacccagattggagtgcagtggcgcaatttcggctcactgcaacctctgcttcccgggttcaagtgattctcctgcctcagcctcctgaggagctgggattacaggccggtgccaccatgcctggctaatttttgtatttttagtagagatggggtttcaccatgttggccaggctggtctcgaactcccaacctcaggtgatccacccgcctcaggctcccaaagtgctgggattacaggcgtgagacactgcgcccaaccttttttttttttttttttttctgaaacagagtctccctctgttgcccaggctggagtgcagtggcacaatcttggctcactgggacctccacctcctgggttcaagtgattctcatgcctcagcctcccaagtagctgggattacaggtgcccgccactatgcctggctaatttttgcattttttgataaagacagagtttcaccatgttggccaggctggcctcaaaatgctgacctcaagtgatccccctgcctcagcctcccaaagtgctgggattacaggcggaagccatcgcgcccaacccgtctggtgtattttatgctcagtgtaatgtttttgagattcatccatgttgtggcatgtattagtgtttcattcctttattttttatttttattttttaaacagccagggtcggctgggcaaggtggctgacgcctgtagtcccagcactttgggaggctgaggcaggtggatcacctgaggtcaggagatcgagaccagcctggccaacatggtgaaaacctgtctctactaaaaatacaaaaaaaaattagctgggtggccgggcatggtggctcacgcctgcaatcccagcactttgggaggccg[132 bp omitted]gaggcaggagaatcgcttgaacccaggaggcggaggttgcagtgagccgagatcgcaccactgcattccagcctgggcgacagagtgagactccgtctccaaaaataaataaaataaaataaataaataaaataaaaaataaatcctgtcccagtggggctgatagagggcaaagctctccaagtcctcctcaccccttctgctgccaaatgcctctcctctgggtctcgtcttcctcctttcgcttctttttccggaggtctccgtttgcccagacatgaatctgagccaccccctgccctcaggggaatccctgtctgtgggcaacacagatgatcagcaggtgacagctcctctaaaggaagtcacacaaagctatgagggagcccaggggagggaggggtccatgctacctgctcctccgtcggccctcaacactgatctcctgccctgccctgtcctgtgtttgccacctggctgattcccacttctcttccaaaaacataataataataaagacgagaaagcccaggtgatcctaaggaagacttgtccccgctctgagcctccatacccaactcggtgtcctggcacaaagatgagtttggctcactggtgtccccacggtgcttatgtgacctgcttggaccctccctgggaggacaggggacagggctccagcctgccgagctactttcaagttgggaattaggccccactcaccggccacgggtaggttgggtgtctggagcctgaaggatccttccagaagctagggctgctggcctggctcagccgaggggaagaggctgtgcttttcctctgagaaagatgacgttgcactttcatattgaggaaaccgcttgtggttggtggtggggactggtttttatttttatttttatttttttattttattttttatttttgagacggagtttcgctcttgttgcccaggctggagtgcaatggcgcgatctcagctgaccgcaacctctgcccccgggttcaagcgattctcctgctcagcctcccaagtagctggaattacagtcatgcaccaccacacccggctaattttgtatttttttagtagaaacagggtttctccatgtcggtcaggctagtcccaaactcctgacatccggtgttccacccgcctcggcctcccaagtgctaggattacaggcgtgagccaccgcggccggcctatttttatttttatatccctagatgtctatgtcccctgcctggaagtttccccagagaggggatgtagacgtctaggaacacagaggtctcagaaccttccccagggaggggatgtacacctctagagatagatgggtctcggacctctgttttcttgtctgcaaaacagggatcatgatggtctgccctcgtgcaattgtgagggtttattggggttatccacataagaccctaaaagaatgcctgtctgaccgggcccggtggctcacgcctgtaatcccagcattttgggaggctgaggcgggtggatcacctgaggtcatgagttcgagaccagcctggccaatatggcgaaaccccgtttctactaaaaatacaaaaattagctgggcatggtggcgggcgcctgtaatcccagctactcaagaggctgaggccggagaatcgcttgaatccaggaagtggaggttgcagtgagtcgagattgtgccactacactccagcccggacgacaagagcgaaactccctctcaaaaaaacaaaaaagaaagaaagaaaagaaaagcaagagattgactggggatgaggttgctgaaggataaaggaggagaaaggccaggcgcggtggcttaagcctgtaatcccagcactttgggaggc[137 bp omitted]ttcagactgcaacgtgagtgggtctgggtctgacactggagaaaggagatggggagagtggaagaatcacagaccatgtgcagttctgagaaccccggtcaggtcagctgggaaatgtggtgcaaagatcacccatacgcaagtccatggagaccgaaagcaagtcagtggttgcaaggggtgggaagaggggaggatgggaaatgattgcttatttggagtttccttatgggggttatgaaactgttttggaactagatagagacgaaggttgcacaacattgggactgtgctagacgacaccgaattatactttaaaatgcttagagtgggccgggcgccgtggctcacgcctgtcatcccagcactttgggaggccgaggcgggcggatcacgaggtcaggagatcaacaccatcctggctaacatggtgaaaccccatctctactaaaaatacaaaaaaattagccgggcgtggtggcgggcgcctgtggtcccagctacccgggaggttgaggcaggagaa[131 bp omitted]atttaaaaattaaatttaactttttttttttttttttgagacggagtctcgctctttggcccaggctggagtgcagtgacgcgatctcggctcactgcaagctccgcctcccgggttcaaaggattctcctgcctcagcctcccgagtagctgggactaaaggcgcccgccaccacgcccggctaatttttttttttttttttttgtatgtttagtagagatgaggttccactgtgttattcaggatggtcttgatctcctgacctcgtgatccgcccgcctcggcctcccaaagtgttgggattacaggtgagagccaccgcgcctggccaaaaagttaaatttaataaataaataaataaacactttagcacattgactttagaggtgtccacattgggcagaaacggccaggctctgctccccaccccatgcttagtcatcggtcaaggctgcataaaaagaatgtaatagcaatccaaatcaaacactgctgaaggtgctactgctggaggctggagaccagctgaagtcctccctgctaatcaagttctttcaggaagggtgagccacctggctaccgtacttgcccaatgtcactcagctaccgagtggagcagcttgggtctgtctggctgtaaagtttggttccttcctatgtgccatgcaatgcccttgaatatccctccttatcttcacccatccaaccttctcctgaaacatccatttatctgtgcatatgttcatgcctttgtgcattcctccagctagttatttctccactcatccacccacctgcctatccggccagccatttgctcatatgttcttttttttttttttttttgagatggacttttgctcttgttgcccaggctggagtgcagtggcgcgatctcggctcactacaacctctgcctcccgggttctagcaattctcctgcctcagcctcccgagtagctggggttacaggcacctgccaccattctacctagaagtagaattactgggttgtatagtaacatttttaggaactgctaaactactttccgccatgtgtacacgatttacaccattttacattcctgacagcagtgcatgagggtttcaatctctccacaccggcaacagtgcctgctattatcggtctttttaaaattacattacaatcttttttagggatgagatctggctttgttgctgaggccagagttcagtggctattcacaggtagtgtcatagcacactacagcctcgaactcccggcctcaagagatccctttgcctggccaggagtcatgcctgtaatcccagcactttgggaggctgaggcaggcggatcacttgaggtcaggagttggagactagcctgaccaacatggcgaaaccccgtctatactaaaaaaaaagaaaaattagctgggcatggtggcacacgcctgtaatccgagctactcgggaggctgaggcaggagaatggcttgaacctgtgaggcggaagttgcagtgagccgagactgcgccattgcactccagcctgggtgacagagcaacacttcatctcaaaaaaaaaaaaaaagagagagagatcctcatgcctcagcctcctggcctcaagagatcctcctgcctcagcctcctggcctcaagagatcctcctgcctcagcctcctggcctcaagagatcctcctgcctcagcctcctggcctcaagagatcctcctgcctcagcctcctggcctcaagagatcctcctgcctcagcctcccaggtagctggaattacaggcctgtgccaccgtcccccatttgatgtgtctttctgatggtaatcattctggagggtgtgaagtggtgtctccttgtgggttgaatttgtattgccctagtgactaatgacgttggacatttttccatgcattcattggctatttgcatatttctttggagaaatgtcagatctttgttcatttttgaaattcggttgtctgtctttttattattgagtcataagaattttttttttttgaggtggagtctcactgtgtcacacaggctggagtgcagtggcatgatctcggttcactgccatctccacctaccaggttcaagtgattctcctgcctcagcctccggagtagctgggattacaggtgcctgccaccataccaggctaatttttttttttttttttgtatttttagtagagacagggtttcaccatgttggccaggctgatctcgaactcctaaccccaggtgatccacccgcctcagcctcccaaagtgctgggattacaggtgtgagccaccgtgcccggcttagggattctttgtgttttttttagatggagtcttgctctgtcgcccaggctggggtgcagtggcgcgatctcggctcactgcaagctccgcctcctgggttcatgccattgtcctgcctcagcctcccgagtagctgggactacaggcgcctgccaccatgcccggctaattttttgttgttgttgtttagtagagacagggtttcaccatgttagccaggatggtttcgatctcctgaccgcgtgatccgcctgccttggcctcccaaagtgctgggattgcagacgtgagccaccatgcctggccaaggattctttatatattctggattataaggcgatcattatcagatataatgatttccaaatattttctcccattcaatggataacaatcctcttttgacctaatattccctcttttcttcaggatctgacttcttgcattgttgtggttagtcattgactcattcagcaatttttttttttttttttttgaggctgagtcttgctctgtcacccaggctagaatgcagtggctcaatcttggctcactgcaacatctgcctcctgggttcaagcgattctcctgcctcagcctccctagtagctgggattacaggcgtcgccatcacacccggctaatttttgtattttcagtagagacagggtttcacca[139 bp omitted]actgctttttgatattgagactcaactctgaacaggacaagggtcctgccctcctggcacttatgttctagcaataaacgaataaataaagagatatgtagtggtagccagggggaggtaacctgtgtagccaccaggggccccattctcagaagc[133 bp omitted]actccatctctactaaaatacaaaaaattagctaggcatggtgggaccttaccagggtgagtggtgggaagaatagttccaataaggtgagagaggtaatgaggggacaaactgggcggggcccgggggccattgtaagaaagttagatttttttttttgagacggagtctggctctgtcatccaggctggagcacagtggtgcgttctccgcttactgcaacctctgcctcccgggttcaagtgattctcctgcctt[134 bp omitted]gcctcccagagtgctgggattacaggcgtgagccaccacgcccggcctagaaagttagattttaatctaggcgtgtgctaattcagcacagcaactccagaaaacgataaacatttacttcacctggtttttatgggtcatacatttcggaacggcttagctgagcgattctggttttggggtgcttggaaggttgcagtaagacatggaccagggctgcacagccacctgaagacttgatggacaccggaggattattgccggggtggcccaagcacgtggctgacgagctatcgggaggcctcagctcctctccggctgctggcttgaggcttcagttcctcgaaacatggacctctccgcagggcagctccaatgtcctctctctctctctctctctctctctctctctctctctctctctctctctctctctctctctatatatatatatatatatatatatatatttttttttttttttaaagacagggtttcgctctttggcccaggctggagtgcagtggcgcaatcttggctcactgcaacctccgcccaccgggttcaatgattctcctggctcatcctcccaagtagctgggattacaggcacccgccaccatgcccggcaattttttttttttttttgtacttttagtagagacagggttttgccatgttggccaggctggtcttgaactcctgacctcaggtgatccacccacctcagcctcccaaagtgttaggattacaggtgtgagccaccgtgcccggcctgcaacgtcctcttgacatgggcatcccagagagagcaaagtgaaagccacagagtttttttaggatctaacttttgacacaccatcatttttgcaatatcctgttggttacacagctcagcactgttcgaggtggaaagagccacacaaggatatgaatcccagaagtggaggatggggggccgggcgtggtggctcatgcctgtaatcctagcactttgggaggctgaggtgggcggatcacaaggtcaggagttcgagaccagcctgaccaacatggtgaaaccctgtctttaccaaaaattcaagaattagccgggcttggtggcgcgtgcctgtaatcccagctactcaggaggctgaaagagaggagaatcctttcaacccaggaggcagaggtggcagtgagctgagatcgcaccattgcactccagcctgggcaacagagcgagactgtctcaagaaaaaaaaaaaaaagaagtggagaatggggggtcattgagggccgttttgggagctggctaccacaaaatatcaattcattgcaaaatttgagtaggagaatgatgaggtgtgtgtgtgtgtatgcaatcatatatgtatatagatatagctatataggtccgtgtgtgtatataaattaatatatagtatacaataagtatacttatagggccagatacagtagctcatgcctgtaatcccagcactttgggagcctgaggcagtaggattgcttgagcccaggagttcaagaccagcctgggcaacatggcaagacctaatctctacaaaaaataagaaagccaaatgtggtggtgcatgtctgtggtcccagccactcagaaggctgaggcaggaggatggcttgagctcaggaggtcaaggctgcagtgagctaggatcacaccactgtactcgagcctgggcgacagcgtgagaccctatttaaaacaaacaaacaaaaattattgaatatttgaccaggttcccgctgaggctgagccttggaatctgtattttaatcacattcccaaggtgactttgactccccacaccccacctttttttctttctgtgtgtatagttcaacacaaaaaacatcaaattcaccattttacagccagatgccgtggctcacatctgtaatcccagtgtgtgggaggctgaaactggaggattgcttgaagccaggagttctggaccagcctgggcagaatagggaaatcccatctccacaaaaaatttaaaaattagccgggtgtggtggcatgtgccggcaatcccagctacttgggaggctgaggtgggagaattgcttgagcccaggagagcaaggctgcagtgagctatgattgtgtcactccagcccgggtgacagagtgaaacgctgtctcaaaaattaatgaattggttaaaattttcattttaattaaagtgcaaaactcggtggtaggtgtgtgagcaatgtcgtgaggccatgccgtgagttatgatcacaccactgcacttccacctaggtgacagagagacacttatatgtgtctctaaatatatatataccattttaactattttattttatttaccattttattattttttgaggcggagtctctttctgtcacccaggctggagtgcaatggtgcgatctcggctcactgcaacctccgcctcttgggttcaagtgattctcttgcctcagcctcccgagtagctgagattacaggtgcctgccaccgtgcctgcctaattttttgtatttttagtagagacagggttttgtcacgttggccaggctggtctcaaactcttgaccccaggtgatccaatcacctcagcctcccaaagtgctgggattaccggcatgagccaccatgcccggccccattttaactgttttaaagtgtacagttcagtggtattaggtacaaccatcaccactatctacttccagaacttcttcatcatcccaaaaggaaagcccatacctgttagcagtcacttgccccagcctctgcaaccgcgaatttgctttgtgtctctatggatttacctactctggatatttcatagaaatggcgtcgtaccgaatgtggcctttcatctccggctcccttcacctagcatgatgttttcacgggccatcggtgtcccagcatgagtcattccttcttattttattatgccacctgaagtctgagacccaccccgccagctttcagcagctggtttctttctgggcagtgcggccgggagcttgagagtgcaaagtgcactagactctggagtcccatgacttggatgttaactctgggccggttacatcatctctgtaagcctcactttgcttatccgtaaaatgagcattataacagcccctccctcacagggctatttgcaaagtggctgctgtgtggtaagagttcagtaacagctttcatgttattccatgttgtgagagattgagagatgctagaattcgtccaactatgtcctattgttggacattcttttctgttttttgtttttttttccgacattttgctctgtcgcccaggctggagtgcaatggtgtgatctcgcctcactgcaaactccgcctcctgggttcaaatgattctcctgcctcagcctcctgagtaggtgggattacaggcgcccacgaccacgcccggctaatttttgtatttttagtagagacagcatttcgtcatgttggccaggctggtcttgaactcctgacctcaggtgatctgcccgcctcggcctcccaaagcgttgggattacaggcgtgagccaccgcgcccgacctacttttctgttttttcaacaatgctgagtgatatgatttggctctgtgtccctacccaaatctcaccttgaattttaatccccataacccccacttgtcaaaggggggaccaggtggaggaaattgaatcatggtgaacccccatgctgttctcatgataatgagtgagttctcaggaggtctgaaggttttattttatttatttatttatttatttaaagatggagtcttgcttgttgtcgcccaggctggagtgcaatggcgccatcttggctcaccaggacaacagaatgagactctgtctcaagaaaaaaaaaaagaataaaaccctggaagtggaattggtgggtcaaaattttatttgtattatgaaat[137 bp omitted]ccatctctactaaaaatacaaaaaaatgagccaggcatggtggtgggcacctataatccctgctacttgggaggctgaggcagagaattggttgaacccgggaggcggaggttgcagtgagccgagatcacgccactgcactctagtctgggcgacagagtgagactccgtctctaagaaaacaaaaacaaacaaacaaa[132 bp omitted]aaccccgtctctactgaaaaaaaaaaaaatacaaaaaaattagccgggcgtggtggcaggagcctgtaatcccagctactcgggagggtgaggcaggagaatggcgtgaacccgggagacagagcttgcagtgagcggagattgtgccactgcactccagcccgggcgacagagcgaggctccatctcaaaaagaaaaaaaaaagaaaaaaaaggaacagacagtaaatataatgaactgatgaactcatgtcagt[136 bp omitted]agtgaaaccccatttctactaaaaatacaaaaaattagctgggcgtggt[132 bp omitted]tcaagataaaaaaaagaaagaaaagaaaaagaaagaaggaaggaaggaaagaaagggaaagaaagaaagaaaagaaagaaagaaatgcagttttgttacaggtgtagttaaaaaaaatagagataaaaagaaaaatataatgaactcatggattccaccacagggcttaaacaaaatttccaaataccaatgtcccgtgtagctttcccgattgcattcttccctccccaccctcaggggcggccgcttccctccccatgctgtgttagtcatgcccttcacgtgtgtatccttttgccacatgtatccacatgcaaccattgttttgttttgctttgttttttgagatggaatttcgctcttgtcatccaggctggagtgtagtggtgcaatctcggctcactgcaacctctgcctcctgggttcaagcaattctcctgcctca[219 bp omitted]gtagacttctgcaactacgggttgtcccgggtgatatatgggacactggtgcatctactttcactgacatatggtgttcccctgtatcaatataccaggatccatgtttccattcttctggtgatggaaaccgtttccagttcctcaccgttacaaacacgatagcgagcattcttgcatttatctctttattccaagtcggagagtttctctagagtgtacacccacccactagtagaaggactgtacttcatacagactgatacaacttttccagttagctgagtttccatgaagtcctttatgcttgccatttccccctccctgggtaaggctgcttttctcttctggagctggtcacctgtccctccccactgatgaccaggagttacagttggcatcaccttgctctggtatggccacctctgtccacctctgtctcctctagctgctccatggcaagtccccagccccagttcccttctgccggcatggtcctggtcaaagtgatggtcccgagaaaggtttggtcgactttagctgtagtggtgcctgcctgagttagggggtatttcagagctcatgagagattagggaggtaaagcatggggctaggggatagtccctgttggagaagaaatagcatgaacaaagggtggaaagctggaagccaaacaagtgtatggtctatgttttatagatgggaacccaaagcccagagatggcaagtcacttcctcaaagtcacagagcaatgcagagactgtcagcttcatccttattggttggtcattcacacattcattcagtacatattaacaaagtgcctaggccagccatggtggctcacacctgtaatcccagcactttgggaggctgaggtgggtggatcacctgaggtcaggagttcaagaccagcttggccagcatggcgaaaccccacctctactaaaaatacagaaactagctgggcatggtggtgggcacctgtaatcccagctactcaggaggctgaggcaggagaatcacttgaattcgggaggcagagagccgagatcgcaccactgtactccagcctgggcgacagagcaagaccctctctcaaaaaaaaaaaaaaagaagggagcatcacttgaatgagcccctagagagaccctgtctctacaaaaattaaaggattagccgagcatggtggcatgcgtctgtggtcccagctactcaggaggctgaggctgtaggatcgcttgaacccaggaggtcgaggctgcagtgagccatccttgcaccactgcactccagcctgggcaacagaggaagaccctgtctcaaaacacaatacaggccaggcatggtggctcatgcctgtaatcccagcactttgggaggctgaggtgggtggatcacctgaggtcaggagttcgagaccagcctgaccaacatggtgaaaccccgtatctactaaaaaaaaaaaaaaaaaaaaaaattagccgggcatggtagtgcatgcctgtaatcccaactatttgggaggctgaagcaggaaaatcgcttgaacctgggcggcggaggttgcagtgagccgacatcgcaccattccactccagcctgggcaacaagagggaactctgtctaaaaaaaaattagccaggggtggtagtgcatgcctgtaatcccagctacttgggaggctgaggcaggagaatcgtttgaacctgggaagcagaggctgcagtgagccgagatcactccactgcactctagcctgggcgagagagcgatactctgtctctgtctctctctctctctctctctctctctctctctctctctctctctctctctcacacacacacacacacacacacacacacacaccaaaacaccaaaaacagcacaccaaaacagcacctactctgtggcatgcattgttttaagtgcccacgatctatagctgtacagtggagcgcatgtctgacagtgatcctatatgtgtagacacacaagcgcctacattgtgttaccggacagtaacatgctgcacagctgtgtggcccaggagccgccggccaccttacagcccaggtgccagcagccctgccacgtaggtgtgagtgatgttgctctaggatgctggcaggatgacgacatcgcctgagcacgcactgcccagatggtatcagtgtcgttaagggaagaatggctgtggcgaaacaaacaaacaagcaaacaaagaccgcctgttctgagtgtggagcttattattctcggcgtaattatgatgaattgttagttacgtttgcctctaggattgaggtagggggggtgatcccaattagggggtgccccaggggagcgccccaggagtcagggcttgtctcaaaagtccccactcctccctcagcctcccctccctccatccgaccccgttcatatcgcgggaaggtcccacagagtgcgtgtggatactcccaaaacgcaacggtgtaaacggggagggagggagagagactgaggagccctttgtagccaggcagagctgtcaataaagtttcgtcgccttggtaaccgcaggcctcgcggggcgggaggggagagggatggcggtgcgcgcgcattcaccgcctccctcccgccgggtctggctttctccctcctgtggccgaagctttcctcggagaaatagaagagggaggccgcgactctatggtgatggacggaggccttacccaatggaaagaggagctgtcccaaggccaggcaatcatatacgactactggagctggcagagcccgccctctttccacttggacctgaataacccgacccaaaccgagtttcgcccggagagactgcgctttcggccaatgagtgcgtcgatttcgagccccagtgtgagcgaaggcgggacaagtctccatggcagcgactaaaggacagcgatgtgaaccactgacaacagttcgcggcgtttgacggcggcgggggcgtggcggggttttatctgtgtattgacgagagccgggcgcggagggaaagagtggggcttggccaatgggagcgccgtgagcttcgtagcaacggaggagtggcggtggctgtggccaatagaaagcctcagtggccttggcggggctggcccggagagcagatgggaggtgcggcgacagtgtttgacgagagccgaaggaggctgtgggaggtgttggcggcggcggcgcgggcgcctgaggaggaggaggagaagcgggtgaggggcggcgcggggcccgatctctgagccccttcacggccccagccccgcgccgccttggctccccagtcgccccctgccccgactgccccccaccccgcccggcccctcctcgtgtccaggcgcccacgtctcccggcccctcgccgggcctcgggctccgcggcactgcagcctccttcctgtgcttcctcacccgggccctgacccccttcttacgtccacggccctccctgcatcctcagggcctctccctgacctcttgtcactctccaggcctctccctgcaccccccagggcctttccctgacctcaccctccaggcctctccctgcacccccaggtctctccctgcaccctcagggcctctccctgacccttctctcacccccgggacctccctgcactcccagggccaatccccgacctcctctcaccctccaggcctccttctggaccctctaggtctttctgtgccctagaacctctccctgacccctctgtccctctcctggcactccctggaccctgaggtcggcctctgaccctccaggtcccttgccctgggctctcaccgcctacccaggcgcctccctgggtccccaggcccttccctagggtctccctttcctggatcccccaggaccccaccaagcccgtttggatccctgggcccctgtccgccctctcaggcccttcactcactggacacccaggatcttctccgccatccctggaccgccccccgacccaggtctcccgtctggctcctccctgagtccctaggccattccccgctctctgtcctccctggcacccccatcccttcctcacacccctctgagcgcccccaggcccggctgcagccttctccctcccacagccccctgccgtgcccaccgctgtgcgtttctctccttgcccccagccccctctccagcttccccgctgtccctggcgtcctcctgcagcgccccctctttctctcccgcagcctcgcagtctgtccccgacccctccacagccgtctctgcagctcccgctccttgccctgccccatctcctcctctcctgggcgcggatgagcctcgagcgccgtggtgcggggacgaggctggccctccgtccgggttaggggtttgggtggttttcttcatctctccgttctctcctggctccgctttaaaaaaatgtttttgtaaatattgacctgtgctgcctccccatagtcttcctttgctcccctccccacccccgcttttgtcctctgagcccccctcccctggaatccttggagagggagcaggtgctgggatccctcccctgccctccctcccgtcacccgcctccaggctgcctggggcttcacccggagcctcctgaccactcccgaaggctgccggggaggcagggggcggagaccgaggctgggtcgaggtgggggtggagggcgggacctcgggctggcgggaagctttgacttttcctccttgagggctagaggtgaagcggctccccacggtgctaagcctttagggtgatcccggctgccaatcagtcagccttctctgggcccaaagagatgtgtgtgtgtagggggtctctgtacatatgggcaggggcatctgcgtgtgtcagtctgagtgtgcatgggtgtgcatgtgggggttgtgtgtttaggggggatctgtgtctgcgctgcggagcaagagcaagagctaaggcgatggctgacatggctctgggctttccctactctcagaagtacttgttgcattccatcttcgccagcggcctggtgaagtcagcactgcttttctccccattttgcagatgagatcgtggggctcaccagcgtcccccatggcttctgagtagcgtgggagtggagtcagcaccaagccaggctccccgcgcctgccttgccctcacctgctcctgctctctgccagaggcagcatggtccgcagggcaccatggggcccgacagagtgacagcacgagaactgtgcgagaacgacgacctggccaccagcctcgtcctggacccctacctcggtttccgcacccataagatgaacgtcaggtgaggtggcctgggggcgagggtgggcccgaggggtcaggacccctccccttgcaccgctgccgcccctcggccctctccttagcctggtcctcccctcagctccaagtgggggttggggccggggcccgggaaggccctgggacccaggcatgccctctcccccagccctgtgccccccctgcggcgacagcagcacctgcgctcagcgctggaaactttcctgaggcagcgggacctggaggctgcgtaccgggccctgacgctgggaggctggacggcccgctacttccagagccggggcccgcggcaggaggctgccctcaagacccacgtgagggcgccctcccctcccccgccctcaccgcgtgtcctccccgctcaccgggcctggtcccgcctggcagacgctctagagtccctcagcgcagcccctggggccccctgacttcctagcccttgggaccatctgaggcaaggctcagagaatcctaggagaggagagttgggggggccctctgagatgtagtccaacctcttcatttgacggatgaggaaactgaggccccgagagggaacatgaggcccccaagaccacacagtgagtcagtggcatggcaggcctagagtcctggagagagagggccaaagatgcccctgccccgcctcctcacccccaccctcaccctcaccaggtctatcgctacctccgtgccttcctgccggaaagtggctttaccatcctgccctgcacgcgctactccatggagaccaacggggccaagatcgtgtccactcgtgcttggtaagagggcaggactccctgcaggtatccttggaggagacagagctcagaggggacaagagagaccctctgttcatggactggccaaccggggaaaagcgaggggcctggtcctccgggcatcctaggaaggtggtggggctaatcccggaagacctttgtggctaccgtggtgccgctggagcaggagaccccggatgtgaccccagggttcctggggcttccaggaaagaactaggcttctggtcagggccgtgctgtccttacctccttgtgacctgagcccccaccacatgttaaacacccctgagtgcaatgaggagcccctgcccctgcccctgcggggttcacagtctggtgaggaggtggggggcagacaagtcaacatgcagtcactggtcccagctggtacatgctgcaggggagctgtgaggaatgagcaagtgctcccagggcgaggctcacactgacaggggaagcacccgcctgagggtctggtggggcgagtagggggtagtccaggcaggagggatttgggggcaggaggtgctatgagagcgaggggagagaatgggggctgtatctgctgtgtgcgtgctgccctgaaggctttcagtagaagggtcctgtggggctgtgggctggagcagggaagcccacccaggcaggaggggaagagggagatctggaagatggatcgccaatagccagcaccagcgcccaggagtccctccttcctgggtgcctctgtgccggaggcccgagtcccctgaacacctgcaggaggccaggcatcgcccacagccctgccccctggcctcttggcaggaaaaagaatgagaagctggagctgctggtgggctgcattgcagagctgcgggaggcagatgaggggctgctgagggccggtgagaatgacttcagcatcatgtactcaacccgcaagcggagtgctcagctgtggctgggcccagccgccttcatcaaccatggtgagggtcaggcaggtggatgggcaggacgggatagagccaggcagggctggaggggtgtagtgggagggttctgcgactgagctgccgagctcatctacctctcttctctctcctgccccaactggctccagactgcaaacccaactgcaaggtaaggccttgggactcgggaggagagggcacgcaggaagaaagggtgcctgtggcctggggaaa[132 bp omitted]tactaaaaacacaaaaaattagtcgggcgtggtggcgggcgcctgtagtctcagctacttgggaggctgaggcaggagaatggtgtgaacccgggag[138 bp omitted]ggcagagtgggtatttgctcacaaggctaccagaaaggaggaaggggttccagtttggccagcgttgcccggctgtttgtgcagttgcactggaaccctggttgccagctgctggccatctttcttctctgaaaaccgagctgggagctgtgccaatttgggcagggagtgtggcagggaggcagggccctgtggtgggagcccccggccttgcagggaacaacgcaggcagctgtggtggcaggagcagggaggccagagagccccaggggccaggactcaggatgctgtccagacatgcccaggagaggccgctggttgtcctgtagcccggaagcagaaggaatcaggagggttggctccagggcggcattgagggtgcaccctctggagcacagacctcgatggggcaccccgggaggcatgacaaagggatccagatttttggctccagagtcagaactgagttggggtcctggcgatgccacccctggcctttggtttttcatctcagatggggttggtgaggatctctggaactctgcgggctggtcaagtgtgccggagggttttggacagcgaatgcgtggccctggtctgacaccacacacagacgctgggggggatggaaacaaaaggcggcattcggagaggctctgcagggccagtgtgctccagccaccttgagcacacgagagggcggccagctctccagcgatctagaaccatctggcttcacagaagccatgctgggcatcgacggaggagtagaatttccctaggtgttaaaggaaatcaggggcaaaggggggcgtctagcaggacacggcacaccagagggctgggggtgcccagcgacggctttgatccggcagcaaggccttggggtccgggccagggagccatggaagctccccccagggtgtataatgggaagcttggtttttaggtcaccctggaggcccatgtgcaggaggcttggcaggaaggggagaggctgtaggcagggtggccacaaagaggtgatgaggggctgactccagtaggggtctcggggaggcgaggaggatgaggatgcgggaggtggcacactcagaaggcagtggccggttggtctgggggccgtcaggcaggcaggtggcgagggctactcccaggcaaatgtcaggcttgagtggatgggtagatggacagttgggtggacagtggtcatgccccctcctagacggggaacagggaggaaggcgcagctgtgtggggcttaggaggagcctgtggggcagctcctgggtgaatgatcccaaaggcagggccagagcacacacagattgggctgtggagtgaggcaggcctcagagaagcgggggcggcccgcagcaggcagagctcggacctcagctgccaaggcacagtctggcggggggcaggcagctcaggaggggatgggcttgggtgtggcagaggaggtggggcttggcacggggccacagaggctggagggagtggtcaccactgctggcactgcacgctgccagaaggtcaggttagatcatcgtcctgcagggaggggtggaaaccagccagtgggtggattgtccaggggctacaggcaaaggacaggccctcggcaaggcagccgcctcggaatgccacttttaggggctcagctgttgccccattccaggagaggacgctccgggccagggtgcccggccaggtgtggggagtgggtgagccctcccctgtgccctgggccagggcgctgagtgggcttggccctcagtttgtgcctgcagatgggaacgcagcctgcgtgaaggtgctccgggacattgagcctggggacgaggtgacatgcttctacggcgagggcttcttcggcgagaagaatgagcactgtgaatgccacacctgtgagaggtgggaccgggcgagaggcggctgggttcgggtcgtctgggcttcttgagcccagaaacgcaccctcgggacccatccctgagtgtgtccaaccccagcctctcatctcccttccacccggcctcatctccccttcacccggtctcccaggaaaggtgaaggagctttccgaaccaggcctagggagcccgcgttgccaccacggcccctggacaagtaccagctgcgtgagaccaagcggcggctgcagcaaggcctggacagtggcagccgacagggcctgctgggccctcgggcctgcgtgcacccatccccgctgcgccgggacccattctgcggtgagcacccctccctgccatcccagcagcccctcccctgtctgctcctggtcatctgtctcctttcttctgagctctctgcctagcctggaaccctccctcccaccctcagtcgctggcaggcctcgctgttgagcagttcggccgcatcattcctctggggagcgcagggcagggctgcctccttgtccagaggaggaccggcccagcttgcactgacttcacctctcctttgttcctcctctccctgccacctgggccttcacagccgcctgccagcccctgcgcctgccagcctgcagcgcccgcccagacacctcacccctctggctccagtggctgcctcagccccagccccgagtgcggccccggaagcgccgacgcccccggccccggagggccccagtgctctccacccaccacgctgcccgcgtctccctgcaccgatggggaggctgtggcccccactgccgcctgcgaggagaggccctggtggccctgggccagcccccccacgcccgctgggcccctcagcaggactggcactgggcccggcgctatgggctgccttacgtggtgcgtgtggaccttcgtcgcctggccccagccccaccagctaccccagcccctgctgggaccccaggccccatcctgatcccgaagcaggccctcgccttcgcccccttctccccacccaagcgcctacggctggtggtcagccacggctccatcgacctggatgtcggcggtgaagagctgtgacaggccggacggggaggcccagcagggagagagggtctctctcctagctgctacccaggacctccagaaggagcccttggacctctgggagggagctgacccttgactccagcatagctctgaccctggaatggggttggtttggacacccccagggatctgagccctgaccctttgtgactgctgacccctgagccacccccactcccacagggagccccggccatttgctgccctccccacccctgccccagcctcaggactgcaggagccatccgcccccctcagccccttcctccccagggagcaaagccataaggggcaggggccaccccacggcatctccccagaagtacaggcctcaggaggaggtggaactgatgtagggggtggcactccccagagactgccctcacgaggggactgggttcgctctcagctctgcagctgtctgcggtggggggaaggttggggggtgtctggaggcatgttcccctcaccaccccccgtgggtctcagggaggccgggtgtgacctcatctttctcatggtgctatcctggtgctattggggtggggagctccctcccctcccccacaccagaaaggggtatgttgggggcttggaagcacttgaactttttattttattaaaaccttgttataagcagcacccttggcggttttttgttttggcttatgttttgaagggatgtgaggagggtgagaccctcagctgtgctgatgagagggggaggaggcaacacaggccttcagccctgagagctgtcgggagagggatttgggagcgtgatggactaggggactgaggctggagccccatccccactcaggctgtgcttgtaaaaatgccttgagacccatactctcctaggagtgggtcctcccattttccaggcgaggtcaacatcgtttagcaagcagagtgacttgccaaggccacgtggggacttgagggcccttctcccttctcgcgcttctcaatgagatgcccctcccacatctcactccaaacggagagagactgctgggggcctggctgagtgagggtgtgggggctgcccaggacaccagagccgagcctgggggaggcggcgctgacaggaccttcctcagctgtggcatcttgggctttgccgtgtgtgagaccaggaagatgaatcttgtttcttcaggtccgctccaggatctggattttgccagggcgtcttagctctgcctgctgtctcgttttgcaaaaggaaataacagcggctgactgtgagcaatccctgatcccaggtacctccagcttctcccagatacttttctcactgggccaccgagcccgtctcacttgggcagctacaggtcacctgctggctccaggccccccatgtgcgcctccgcatctgccagccttgaacaagcttactgtggaggtggacgaggccaggctgcaggtatcaggaagctctccttggccctggtggagagggagcaacaggggagcagtggccacagcgagacccatatgagcacctcagcggtggccctgggaggcggggacaagggggcagttgagaacgggtcaaaccttgtttactttaaaactcattagatacgttggataatatggcctgttctatttcttttgcagggagaaaattcctcttataatgcaaatcctgctaagccctgtttgttttctttctcatgttaaaaataaggacggagagagctccaggccatcaaacagcagagagatggctccactgctagtccccaaggatttgtctctgagtgaactgaagccatgctgttcgtttctttccttttttttttttttttttttttgagacagggtctgtggcccaggctggagtgcagtggcgccatctcggctcactgcaacctccacctcctggattgaagcaattctcctgcctcagcctcctgagtagctgggaccataggcacacgccaccccgtcaaactaattttaaaatctttttgtagcaattgtgtctcactgtgttgctaaggctagtctcgaactcctgagctcaagcgatcctcctgcctctgcctcccaaagtgctaggatgacaggtgtgagccaccgcgcccggccttttgtttctgaaattcaggtgctgttgccacagctcttagacaaagagggcagcggagcagggagtctcagctgaggactcatgggtggacattggaatttccaggaaccttctgaaatcttttaaatgttgagagtatatatttacatgcacattttttatagggggttcagagcgttcatcacattctcacaagtttctgtatccgcctctcctctgcccc[136 bp omitted]cacggagaaaccccgtctctactaaaaatacaaaataagctgggcgtggtggtgcatgcctgtaatcccagctactcgggaggctgaggcaggagaatcacttgaacccgggaggcagaggttgcagtgagctgagatcgcatcattgtactccagcctgggtgacaggagcgaaactctgtctcaaaaaaaataaaaataaaaataaaaatggtgagggcgttagaaactggcgatcagggtttcctggcctccgcactgctgccatgctgagctggtgtttctaggcagggcctgtcccatgcattgcaggatgttgagcggcttctctggtctccacccactcgatgccaggagcatgcctctgccccaaccaaaaatgtctccagaccttgcctgatgtccccatggcggccaaagtcagcttctggcttgagctgggcagcaccgggtggtgggggaggggagacaccaggcccatagtgaccgaccattccctgtccttgtcgcagcatggagggtcaggacagccttagggacgtgggcgctctcagtcatctcgcccatacagacaggagctggctggggagggcaggtgtgtctgcttggcgtccctcagctgcaggggaccctggcttccacgaagttggaggcgttcatgctggcacttcccagctggcaggacctgggggacatcctggtggagcaggggcctggggtcatgagttcaccaaggtagctcaaggacaggaagaaacggtggtggcagagggtcctctggtcgaagcctgggcctgagaaccccatcatacacgtggagaccagagcaagggaaacaaggaactcgaaggctggtggctgtaggtgaaggtggaaagaagtttagtgaaacaggaaatacaaccagcactgacctgggtgtgtggcactagaactgctctcagcctttggcaggcaggcagggccctggccaaggactccccaccctgaccccgtgtctccctgtgggggcactctggccctttatgctgcaagctagtaaccagatgcctccaagagctccaggactggtttatggggtcatccctgggctgtctgtccggtcaatcagtctcactgtccagcacaatatggggcaccagaactgggccgacatgctgattcgagtgactcagattgtctctatggctagagaccccacacactgtgaagaggggggccagacactgttctaactgctttatatgttttcacatcgccgtcctccccacaaccctaggaagtgaggtgtcattattatgtcattgttaccatatttcagatgaaaaggccacagcgcagaggggctagggaacttgtcccaggccacatggttagtagcttcagggcctagattgaactcattctcagaaccattcgggctctgccaccttcaggatgggaaagggggaaacccagagagaggaggcgaagctgcggcccctaggagccaggggacagtgagcaggggaggcagcgcaggtggccttcaggatccgtggtctggaggccgggaggacggagcaggttctgagggaagaaccgcagagggaggggaaagtggatgatggaaggattgaagagatggggctggaggaggagaaagaagaggaaaaggagtagagaaagaaggcgggaggaggatgttgagcgaacaaggatgcaggtgttctgggtgggggcaggaataagtagagtggccttggttttctctgacctgggaggttgctgagactgtgaggctggcattaggggtctcaggaggcggctactggacaccagggaaagccagccagagcacctggaggaggtgttcggagtttgcacaggtgatggtccaccaggctggaggccaggccgggcaggtctgcccctgcccctggctcaggcatcagtggggcagtggcggctgcagagggggtcgggagtgtgagaatgtgctgagatgaggtctggaggcagtgaagataggatgatgggaggaggaggaaggaggaaggctggccaacagggcaaaaatgggttctagacacggctctggggaggtcaggaggctgctgtggctgcacaggtgtggcaccctgtgcttgggatgttacctgggtgacctcaccaacttagctccattctgtgactcagagaggggtcctgcccccgtggttctgccagcgcctctgtgcattcgtcaaggctctggggacgttgcatgaacaggaagccctcctgtagttgagtccacaccctgtgccctcaccccattcttgggttgtggtcagagacggagccaggagaccaagatctcagaggtggcgtcatcctgggggatggctcatctagggtgtgtcctgggcagcatggagggcaggtgatggacaggtcatcatggggcagggagcaggatggagtcagccccctgagctcacccagccctacctcctctgataatggggccctgagccatcttggtttgccttggggaacctcgggctcacacaggtcaagaagcttgtctagggtcaccctgcaagttgtcatgattagttgtagtcacctttgaaccctggggttgaacagggcctcataggaccgcttcagtcagaggatggggcttccccctcctaggagcccctctggaaggctgatagctcagggagtacccgttgggaaaaccagcaccccaggctgactggtctcacggctccctcagcaggaccaggctggaaccctagggctttgtcaagcggcactccttggcctggggagaggcaagacttcaaagggcgtctggaaccggaatgcggttccgtgttactgccgggatggggaaggagtaaagaatgattccgagggagctctgagcgtcctctgggtgctggcagtctggcgggggtcacaggagaaattgcggcgatgtgtgcggtgggagagactgacagcggcctctgcggggtgggggtgcggggtgagcctgatgcattggagaactgagcaggctgctacgcctggctgtgggtgcgggtgccgaaagcgtggacaccaggggattctgttggaaataagctggctcacatgatggggatctcgatgttctgggaggggaaatgagccaggtgggagcggggtcgtgatggagagtggtggagagcccagagagtgggggaggaagggatggagtcagcgctgggtggtacaaagaagacccctcaggacccgagatgggatggatcaggggtgggatggggaaggagcctggggagatggtccaggcaggaggggagtagggaaaggactgaggtgagaggtaggtgtggtgattggaggcaggagcaccttggagccatctgggtgggacagtgttgagaactggggaccctgggctggctcgtagctgtcaacgcgaggcatctacctgctggaatggagagggagaagggggacgggaggcattcggcttcctgtcttagggccttgactgcctgctgctacctgatggagcagcagtcccccacctgccccttatcggaaaaagcagcgttagcccggacacaggcacacggaggatccccaccaccaccacgacgcatcgctggctgggcattaagaagaaacatcagcaacagcataccattattcgtggcttagacactgggaggtaggggtggataaccgagacccggggctccgcgagacaaaaagatgcaggatcactgcatcttcagaggaagccgcgctggggcagtcagattttgccggcgaaaatcccgttcttgatctgctcgttccagctctccacctgggaagcagaaaggcagggagcgggacgccggctcagcctcggccgagccctgcacacgcctggcccggcgccccctctgccgactcacccagctgatggggcacagcgagtggtacacgcggaaatagtactcgcagggctgcgtgctcttcccgcggcgggtcctggtcttgaggcagcggtggtagtctgtggcgggcgggggtcacgcggcaagccacgcccattccaggacaggacccgcccctccactgctcgggccctcccagttcttcgctgcttcgtcccgcctccctctcccctggaggcctccgtcccgcccctcccagccaggccccgacccctacctccctcacactgctcctcctacccagaccctgcccctacctacctcgccccgcaccttcacgactcggccccgcaccttccagatcaggcctcgcccctaccaacctcgccccgcccctccaggctcagccccgccttttctcgaccaggccccgcccccaccaacccggccccgcccggcctcccaccctaacggtctccgcgggacttagggtgggagtgcccctccctgccgtcccttgtcacaccctgctcctcccataacctggctgagcaggtctcacccaggaagttctggtagcagttacggatctggttctggctggggaagcgcgggtcgaagggcggcgtcgaccatttccccttggggggctcctgggcttccacatccaacatccacgaaggaggcaactcctgcgagacgggacgggacggggactccgtggggccgagggggcgccctcgctccgacccgtctccccatcctgacccccgcccctgaaccccacccgtcgtgccctcaccagcctgacgttggcggccactggatctgctgtgggatggtcccggggtgccgctcgcttctgagtccgcggggtgcggtcccacccgggtcaggagaaacgcaccccgcggccggattggctaggacgcccgagccccagccaatgggagccgtcgtgcaccgcggggctggtaggggcgcccccaccccaccccttgctcccccgacgccccctcgggggcctgcgcgtgcacacaggcaccgaggtgcgactcgctgagtctcaggctcaagctttaatctctgcgaagttgggcggctccacgggctcgcccccgcccccccccgccccccaatatataaaggcatatccatagttctggtatctaccagagggggcaaatccccccaagcggctttcaacattccgcttcctacagtcggtgcgcacagaaccctcggggcctgtggggttaagaggaaagagcagcggtggggtccgggctcctgggaacccccccgcccccctcgtcctcccccctccgttacccgccccccccaccctcctccctcgcccccctccccccgcccccaggtctaaggcagatctccagggtcttaaagggtacctggcagcgctgggctcctctggacagtttccaactgaggttaagcccccgcatccggccactcggagtgctgggagtgctgcaggctgcagggagaaagcaagccagagagagctttgggggacagggtagggagagaggggtacccagggctttaagagctgcagatgcctggcttaggagagcgtcccccagggcgggtcttgctgtgtgtttggctcactgttgtatctgcctggggcagagtctggcagtagtaaatgcacaataaatccgaggcggaatcaatgagtcttggctctaggggcagacaagtaactggaatctgggcaggtggtttcacctctagatccctgctaagcttctctccctcctgcctggttaatatcaggcctgactcaggattgtttacactgacagccaaatgtacgaattaagaatcccggccaggtgcggtggctcatgcctgtaatcctagcattttgtggggcagaggcgggaggattgcttgagtccaggagtctgagactagcctggacaacatggtgaaaccccatctctacaaaaaataccaaaattagccaggcgtgttggtgcgtgcctgtggttccagctactgaggaggctgaggcaggagaatcacctgagcctgggtagcttgaggctgcagtgagctgtgatggcatcactgcacttcagtctgggcaacatgtgagacctcttttctacaaaaaaatcaaaaacttggctgggcttttggaggctgaggcaggaggatcacttgagcccaggaagataaaggctgccatgagccacgatcacaccgctgcactctagcctggcaatagagctcacccctgtaatcccagcactttgggaagccggatggatcacctgaggtcaggagtttgagactagcctggccaacatggcgaaaccccatctctaaaaaaaaaaaagaaaagaaaagaaacagggtgtcactctattgcccaggctgcagtgcagtggcacgatggtgggtcactgcagcctcgacttcccagttcaaccagtcctcacatctcagcctccagagtagctgggaccacaggcacatggcaccatgcctagttaactttttttttttttgagacggagtctcgctctgttgcccaggctggagtgcagtggcacgatctcagctcactgcaacccgtcgccatgcccggctaatttttgtatatttagtagagatggggttt[131 bp omitted]actcttttgcccaaacttgtcaccattttttaatgtaccccttaaagtggcattcggcacattcacaatgtcatgcaaccacctctacctagttccagggcatttgtatcacccacaaagaaacctccaacctggctgggcacggtggctcacgtctgtaatcccaacacttttgggaggccgaggtgggcagatcacctgaggtcaggagttcgagaccagcctggccaacatggtgaaactccgtctccactaaaaatacaaaaatcagccgggcgtggtggtgagcacctataatcccagctactcggctcctcaagaggctgacaggagaattgcttgaacccaggaggcagaggttgcagtgagctgagatcgcgccactgcactctagcctgggcgacagagcaagactccgtcagaaaagagaagaggaagggaggggagaggacctccaacccatgagtagtcactcccgcttcctccacactagacccctggcctccaacgattcactttctgtctctacgggtcagcctgttatggacatttcatggaaatggggtctttgtggccttttctgtcctccaggtgcccactcttgcccccctacatcctccatgccccagccagaggcagcctcttcacacataaatccgtctccatcattcttctgctccaaaccctccagctcgctcagagtcagagccaaagtccctaaaattgtctgcaaagtcctccatgatgggcgcccccctgctgcacctctgaccgcatttcccaccccgggatccccgtggtccagcacattacaaacactcctgcctcagggactgcagtggctgttccttccgctgggatgctttccccccagatgtcctcatggcttcctccgtcctctcctccaggtcttgacacaaacaaccccagctccgtgagggctccctagagcacctgggctgtggtgggggctgtcctgtgcactgtaggttgctcagcagcatccctggtctctacctgctagaagccaggagcacatcccaccaccaccagccccatggtcggacactgtatccccactgcctagaacaatgcct[154 bp omitted]tctactaaaaatacaaaaattagctgggcgtggtggcacacgcctgtaatcccagctactcaggatgctgaggcaggagaattgcttgaacccaggaggcggaggttgcagtgagccaagatcataccaccgcactccagcctgggtgacagagtgagaccctgtcaaaaaaaaaaaaaaaagtgaaaggaaagagtgatcatctctgtctcataaacagcagagctcacagtaaataatagctgctaacccccgctacctgggcagaaggttcaagacgcccgattcctcctgtatctcctctgccttggtggccgtgttcctcacagtttcaagttctaagagcatgggcaaaagaatttctgaagacgaccccacagtggccagggggtgctgggctggcatcctcatgggctcctgcgacaccctcttgggctgctgggacgccctggctgtggcctccatctttgagatgagggtctccgagaggggcgatggccgtaagtcctcccacggtgaggcggtcagggggataggcgcctgggagattccttccctcttcagactggcagaggtgggcttggagcgaaagggcaccttgggtggccccttggggtcccagggtggctccttcatctcgccccatggctgctccttcatctcgccccatggccgcttgccctccttcacccaggtgtgcgactctggctgctctctgaccaccactggcttcccctccagtaaggacagctggccggggcgggagggcactgaagccatcattgacgtggccgacgcctgcggagtcgccaagagccaggagggaagtgagaccaaagcggatttcgagggctgctctttggagttggccgtgatcatgagcttggtgagggtgagcgcttccacagagaagggcctgctgtgctcctgggaggggccctcgacggccagttccttggccttgacccatctcttccgctgctccaactccttggatctcacgccaggcaggtccggggacctctcttcaagcttcgcccagtgggcccagtcctccaacttcccctggcccctgaaggcctccagggtcacctccttggtttggctaatcaggatgtccttggactccttcttggtcacggtgaagggcgactccggggacttggcctgagtcgtcatctccaccacgtctgtctcctgggtgcgcaccgtcaccaccggctccggtttccctccagactggcttctctccagcacggctcttccaggaattcctgttggcaacacgtcaaaatcgccagggagcttcccccgtgaggcaggcgggctcagcgccatctggtattcggtaggtgaggttggcagagccttctgggatggggcagggaggagtagagatttcttctttggagcagtgggggacacagccttctggggaatggtaggtacagatggggccttctgagatgggggtggggtcttctggggtggggcaggtacggctgaggcctttcggggagaagctgacgcagctgaggccttccgggatggagcaggtatggctggggccttctgggatggagcaggtacggctggggccttctgggatggagcaggtacagctggggccttccggggaggagctgacgcagctggggccttctggggaggagccaatccaggtgggggtttccacgatgaagcaggtacagctgggagcttctgggactggtcaacaaggaacggtgccttacaagatgtgacaaggccagatggggccttctggcagggtggtggccccggcccctggtgggagcccataggcccggccttttccctgcccctggggatggaagagtagggtgtggagaggcaggcagccgggggatagggagccagaccggaggcagcagacgacaaagtgctgcccccagagtccatgaggtcttccgtgtcctgatgccacaggcacgggtccagggagctgcaggagcccagaaagaagccatcagggctgtcagctgagacacagtgtgaagggctctcaaccacatgtccctggcctgtggcttcatcagatgcagatgtgcaggcctgtaggtggacagaggggagaggatacatggtcaggatgcatggagaccccagacccgggagggcagacccctgctccctcctccctcagactcaggagtccaggccccagcccctcctccctcagactcaggagtccaggcccccagcccctcctccctcagacccaggagtccaggcccccagcccctcctccctcagactcaggagtccaggccccagctcctcctccctcagactcaggagtccaggcccccagcccctcctccctcagactcaggagtccaggccccagctcctcctccctcagactcaggagtccaggccccagctcctcctccctcagacccaggagtccagacccccagcccctcctccctcagactgaggagtccaggccccagtctctcctccctcagactcaggagtccaggccccagctcctcctccctcagactcaggagtccaggcccccagcccctcctccctcagatctaggagtccaggccccccacccctcctccctcagacacagaagtccaggccgcagttcctcctccctcagacccaggagtccaggccccccacccctcctccctcagacccaggagtccaggtcccagcctctcctccctcagacccaggagtccaggcctccagcccctcctccctcagctctggggcctgggccctgccccgggtataaggctggcctttggagaggactgtgtctggttggcggtgctggaaatgatgctgaagatggtccaggtggtgatgctggtcttctctggatgggggagccgtctgagccctttggggcaggaaccagagccacacactgtggcaaggggtggggtgggttgatcttaccaggcaagcggatttgggtgtgagttctgtcggggcgggggtctgagtgggacctgcaggagcaataccgtgggactttggtggcatctgggctggggtctcccaccttctcccacccacccaccggcaacaagaccccacgcccacttcttttctgcaggtttcttcctgacgtcagcatgctccagctgcgaccagatgaggggcacagagtcgcccacggcctgagacttgaaactgcgcttgagcgcctggagtgggtgaggaagggacggttagacaggggcagccccttgggcccacaccaccccgccggctcaccttggccttcctctgtctctgagcagccaccgtcttatgcggaaagttgcgctcagcaaccctgactgggaagagaggagacatcctgggtcagggaccccaggggagggcacgaggacctaccccaggagcttgtggagggccccaccaaggaagggggaagagccaaagggtgcagctctgtccctgcgacggggagaacccagaggtcctgacaaacagcagggcctgctcacctgcatgtctgctgatgggctggtcctgcagagatagagggaggcaggaggggcccgggcttccacatctccataacctacccagcgagaggcctaggccccctcctgctcccaggacctgacgatccagctcctcctgcctcagacccaggagtccaggcccccagccgctcctccgtcagacccaggagtccaggcccccagtccctcctccctcagacccaggagtccagggccccagcctctcctcccttgactcaggggtccaggcctcagttcctcctccctcagacccaggagtccccagcccctcctccctcagacccaggagttcagactgccagccctccaccctcagacccaggagtccagaccccacagcccctcctccctcagacccaggagtcccccagcccctcctccctcagacccaggagagttcagactgccagcccttcaccctcagacccaggagtccagggcccttagctcctccgtcagacccaggagtccaggcccccagtccctcctccctcagacccaggagtccagggcccttagctcctccctagacccaggagtccaggaccccaggcccttcttccctcgactcaggggtccaggcccccagctcctcctccctcagacccaggagtccaggcccccagcatctcctccctcgactcaggggtccaggcccccagcccctcctccctctactcaggggtccaggcccccggcctagactttgggctcttggtcgcagtcccctctggatctggccggagggttcctggggcctgccatgccctggtctgtggagctgggatcccacctgcaggtgccaggtggaggcaggcgcttcggccagcggcatatccaggggggccgtgcgcgtggtcctgggggtccaggtgggagccggctcctgaagcaggttgatgaggcggacccagcagtggaacaggaagcccacctcgttgtcaggggcgtccagggccaggtagtactggcggcccgagaccaggcgcagcttcaggcgccaggcagagaggtcatggacgcagaggtggacgaggtccagggggatcatcctgggagagggagaggggagcgtctagagcaggaggggtggagggggcggccgaggggttgggggatgcggcacctggtcagcacgaggccggagcagtccctgtcctcggcgggctggccgatcagcaagatgtcaggcaacaccaggcctggcagggaggcggccacgcccatggccagccggttggttctgtgattcacgaacactgggcccccttgatgggtcacctggggcagccagggagagggggctgggaccactccttcctccagcagccacagcctgagcctccctcctgatcgtcccccacacagtgactgctaaatcccgttccctctcaagatcccccagcacggggggccttgcttcccctctgtccctctcagccccggggcactgggaactggagacctgaacaaagttactctcgaacatgggcagcggacggaggggcaggtactcgcccttctggagggtcttttgcagctcccccagaacagggacccacttcggggtgccctggagcggctcaaggcacctcctgtttcgaagccagatcatggtggctgtggtggatgggtactggtttagggacccagaacccaggcgtgcaggcctcccagccccggcccaccagccttgacccgtggggcttcacgggtgcctggagctcagcgttacagagcgtggagatgccccaggctgggagactcgggcctccgccatggccctgccagggtggacagcaggggtctgggggaggagcctctggtggaggggctttgtgacctcatcggacacacaggggcctcttccaggaactctccggggactgtgggctcccttctcctccagggatacagcctggagttttttgtttgtttgtttgttttttgttttttgagatggaatttcactcttgttgcccaggcagtgagcttagattgccacactgcactccagcctaggcaacagagcgagactccatcgcaaaaacaaacagccctatgcagtgcggggccccaggcgaggctcagaccctgcctccacggaggaggcacgatcacccagacagctctgtggaggcagggtctgagcctcgcctggggccccgcactgcctagggctgtttgtgatgtgatctcggctcaccgcaacccccgtctcctgggttcgagcgattctcctgcctcagccttccgagtagctggattgtatttttagtagagacagggtttctccatg[139 bp omitted]gggcccaggatgggcacctccaaccccagactcaaactagtgacgacacggggcccctggaagtctgtctgggttattgtaaagggaaaagtaactaaagcatttgaattatcatccctactctgccattgacccttctctaggccctgggtaagacccaaatccttactgaacctgtttctccatatctcatgtgtgtgcatgtggcgaggattcctcaacaccgacttgcaaagagagctttgggaaagagccagacacggcgcagaatcccacttccacctctccctagctgtgtgactttgtgcaacagagtccccactccttgtctgagactcagtttccctcgcctgtaaaacagggcgtattcaagagtccaggaggattgtgtaagtaaaaagcccacacttagtgcacagccctgacaggctcaatcagcggtcaactttgtcccctcctgagggcttatttttggagaggaggaggctgatattctgttattctaaaaatagtgtttattatttttaaaatgtgtcatgcaaaatacacagtcatggcagaaattctgtaaaatacagacaatcatacacattaaaagtcacccacaatcccacctctctcctttgacctggagacagtcattgtcaacattttggcgtatttccctttaggatttttgttttaatccatatatagaaagaaaaacacaaaattgggatcacagcatgcagtggttttgtagcctgctgtttcatgtcaggacatcattctttcttttttgagacagggttttgccatgtctcgcaggccggtctcgaactcttggacttcagtgatccactcgcttcgtcctcccaaagtgccaggattacaggcgtgagccaccatgcctggccaatgtcaggatatctttctatatcccaagcaagcctctctccttagcctccctgaatgacagtccctgctccgggcggctgggtggcgttctatccacagatgcaccatgttgcttaaccctcactgttggatatctagattgtttccagtttgctatggtgaacacagccataatgaaccatcttgaccttgcagctttgtcccatacgggtactgttgatcacagggtgacttgtggaacc[132 bp omitted]gaaaccctgtctctactaaaaatacaaaagaaataaataattagctgggcatggtggtgcacacctgtgatcccagctaatcgggaggctgaggcaggagaattgcttgaacccgggaggtggaggttgcagtgacctcagattgcctcactgcactccagcctaggcaacagagcgagactccatctcaaaaaacaaacaaaaggccctatgcagtgcggggccccaggcaaggctcagaccctgcctccacagagctgtctgggtgaccgacccatctcccagtcgctgccccgcccactcgggacctccacctgaatggaggtctcccctccacctgccctgccccagttacccaagcatccagccccagctctcagacaaatcgccctcaagtggatatgtatgacacatttaattccctgttctctgtctcacaaaggtttctcacatttttgtacaaaaacccaggcttccctttcccctccgtccccaccccaacatgaaaagtaattgcttaaataaataatatatgttcctgcccaggcctagatggggaagagccagggcagaagtctgtggacagacttcttggagacccaagaatccgggaccccagtcccctcctcctcggggacccaggagtccacctgcctcccacccctgctcctgaaataaataagtataaataaggcacagatgccccccaggcctcacggaaggactgtctctaactagggggagataatggcggggggatcacctggctgtttcgcccccagtactgaaataaataaataaataagatctggctttggaaggacggtggtggctttgggccccgggtcacagccgagtcttcagcagcagcagtcccctcacggcccagtcaagtgtcaggtgcagcccccccaggatggcgtgggcggccctgatgcccccccaggctgaggaggggggcgccagcgggggcgccggcgggtccgggggtggctggggcagggccaggcgggacatctgtggggagaggagagaggtgagtcacaggtagggggtgcagcgggggtgcagggcaggggtgctgtggagctgcagctgaatcggggctgcatattcacagggggactgtggcgcgtggggtgaagtgtttaggccgggagctcttcaggctgtggggttccgaaaatggaggctggagtcaggacgggcttccagagctgagtgtgggggttgggggtgaagtctgtggagtcagggctggcatctcggttctaggtgagggatcgggcctgggactgttagagtcgccggggctggaatctcagagctgggtttttgttgttgtggctgctgttagaacaattaagaagccaggcgcgggggctcacgcctgttatcccagcgctttgggaggccgaggcgggcggatggcctgagctcaggagtttgtgaccagcctgggcaacacggtgaaaccctgtgtctactaaaatacaaaaaaattatccgggtgtggcagtgtgcacctgaagtcccagctactcaggaggctgaggcaggagaatcgcttgagcccaggaggcggaggttccagcgagccgaaatggcaccattgcactctagcctgggcaacagagcgcgagactctgtctccaaaaaataataataataataataattaagaaacagagtcttgctatgctgcccaggctgtctcaaactcatggcctcaagaggtccttctgccttggcctcccctgccttgggattacaggagtgagccactgctccccaccagagctggggttttacagacagtatctgaggtctgtgggctcgagtctagggtcaggccctggatctcaaggctgaagtcttagagatggggtctctgggttcaagttcaggaactcatgggtgagggctggagtctcagagctagaagttggaatttgagatccagggtctttggagttaggcccaagaaccagggtttgaagtcttctggtctcagggctttgggcctggctttggaagtgagggtcttggagtcgtacaggcgcaggctcaggatctgaggtgtcagggttttcgatgttgggagtgagacatagggcctcagggctcggggtctaggtcctggaggtcttgggtttgtacagccagggtcccaaggctggctttgggtcaaggtcttgtatcttagggcctgggatctttaagatgtcaggatctcagggctggggcctggggtctcagggtctggaggtccatggttttcttttccttctttttttttttttttttttttttgagagagagggagttttgctcttgttgcccaggctggagtgtaatggtgcgatctcggctcactgcaacctccgcctcccaggttcaagcgattctcctgcctcagcctcccaagtagctgggattacaggcatgcaccaccacgcctggctaattttgtatttttagtagagacagggtttc[143 bp omitted]gtcttgaggtgaggatttgaattctcaaggctttgggcttcaggatggggtcttgggtcttaggggctgggatctggggactttgaggtcatggatgatggagtctcagggtcttgggtgagaatttgaagtttctgggcaggatttgggggtctagggcctcagggtctcagggccacaggatcttgggactgcagggtcagggtctcagagcaggactgttagggtcagggtctcagagcggggctgttacggtgtcagggtctcagagcgggctgttagggtgtcagggtctcagagcggggctgttgcactcgggtctggggtctcaggcttcaaggactcaggccacaggattttggggccaggggtgggggtctggggtgtcaggtcttggggccaggacataccaggagctgcagccggcgcagcagccggtccagtcgggcctgcagggtgcccagctcgggctccagggtcttcagggaagagccacctgcccggcgcagccactgcacgtgccgcaggtaggacagtaggtccgctcgcagccttgtcagcacacctgggagctggggatagagccgggacatcagagaacacccgaccagtgcccctcatcctccccgcccccttcactgcctgcctcccaccttgtccccagcccactcccttgcccttacctgtagagctcccagtgcccccgcactcatggccagggtgggcagggaatccaggttgtggtccccgtcagctgggaatttgtccctctggcagggaaaaaagctgtgaggtggcccctgcccagcctcggggctccctccatcccccacgccaggcccccaactcttcccctccctcactctgccacctgagagcccagaacccctccaagtggctgcccgcagactcctctccgttcctctctgcctctcactcctgtgctggccccagcccagtctctcctaccagctgtgcagccagctgccgcgtgtccgccaggagagagcgggtcaggagcacggtgctgtccagctcggcccgagggtctggggaaactcgaggggggccaggtggtggcccaggggcgacagctgtatctggccacaggctcagcacgaccaggaccaggcggcaaacacctgggggcaggataaggcagagagctcaggctggactccgggtctgagagaggagggcctgggcctggactcccgggtctgagggaggaggaactggggtctggactcctcctgggtctgagggaggagaggctgggggcctggactcctaggtctgagggaggaaggcctggggtctggactcctgggtctcggggaggagggtctggggcctggactcccggccttagggaggatggagctggaggtcttaagtcccagggtggaacgcccgcgggcaggtcgcagggccaggcgggcttccctctccctccctggctctggctgccccgcccgtcggagcagacgcggcccggggcgggtagacgggccgggcgtctcccgtccgcccccggacgccggaatctgggccccggggcggggcatggtgggggaggcacaggccagaacctgccccctccccgggccgcgggagcccgagctggctgggagcaggggaaggagccagaagccaggacggagcccgggagacacggacctctcccacgggagaccccttagacgccctcccaggagccccgccgggtgggcggcagaagcccgggccgcagcgcacctgggcggagaggggcagagccatgggcccggccgggccgcgggagcgggagagctggcggcggggggcgcggggggcgcggggggcgcgggggtccggagctcgctccccgcagcccaccccggccgccccgcccacccggccacccgccagccaatcagcgctccccggccgcccgcgcctcgcacacccccagcccgccccccgggcccgccagccgtcggtctgtccgcgcctccgtcggccgcatctgcccggctctccccgctttccccccgcgcccagtctctctcctccccccggctggggtcgctactccctggcttgctccgctctccgcggaccctgcctcagtttccctccggagcctctctgccggaatcccagggagtctcccggtccccgcgggctccctggggcctgggtcgatgggggtcacctccctcccggcaccagtccctgcgtccctgcccctgctcggtctccgcgtctcgctccctctcggggccctgtctggcccgtccctcctgcggcgcctctgattggctgcctccatccgctcctgtctgtgtctctctctgcccatctcctccgccgcctcctgtctccgaagctgctctcctccccggctgcctgtctccgggtccctctctgtgcgactcagcggggtctgctcccacccccgccgtgggtccctctcctccctgcctccctgtcccctccaccctccccatgaaccaacttacagttcatgtccccacagggccaggggttccccagggcagggggcagggagccgggggcctttaacccttccctgtccgctgccgggggagccccgagggtcagctgggccgcggcctggggaggggaggcatgtgccctgagcagcagggccgcggcagtgagggagtgtggacgcctggggggttatatagggggctggggcgggcgggcggggggcaggcggcaggggagggcggcctgacacatcctgactcaccctccctgcctgccttttccattcagacggagcggctgccttgcagggctcacgccgccgcgctcggaggagggcacggaaggaaaagttggaaaagttgaaaagggaaaggggggggtggtcggagaggggctggtgaggtcattggcgtcccctccctccacctccacgggccggagcagacactcaggctcaagcgctggggcccgactgtgggtgggggtccggctggaccaggactagcagagagagatggggaggcaggaggacggaaaggcagagaaaggccggacggagggacaagacaggggcctggagaggtggaggcaggaggaagagggagtggaagggaaggagagagagagagacacacacacacacagagtgaaggacagactgagacagagacagggagatggagatccacagagatggaggcagccagagagacacaccagagaagcaaagaggatcagaggggcagccctggagacagagggagaggttctgggagtcagagatcagagagcgggaggaagacagcaggagggacttggggagacccagggagaccccgaggggaaaggaacagagacaccaagactctgagacagaggatgccgcagctgaagaaaggcaccaggcaaacagagacacggggcagagtgacagggacggagaggccccagggacagaaaaggggagacagagatattagaaagacagagacgctgagatgttggggactcagcaatgggggcagagagtaaaagcctttctcattttttgtttgttttttgtttgtttgttttttggtactgagtctcactctgtcacccaggctggagtgcaatggcgcgatcaatggcacaatctcagctcactgcaacctccacctcccgggttcaagcgattctcctgcctcagcctcccaagtagctgggattacaggtgtgcgccaccacacccggctaattttgtatttttagtagagacggggtcttaccatgttggccaggctggtctcgaactcctgacttcgtgatccgcctgcctcggcctcccaaagtgctgggatgacaggtgtgagctaccgtgcctggcctcgtttttggtttttttgagacagagtctcgctgtgtcacccaggctggggtgcagtggtgtgatctcagctcactgtaacctccgcctcccaggttcaagtgattctcatgcctcagcctcctgagtagctgggattacaggcacccgccaccatgcctggctattttttgtatttttagtagagatagggttttgccatgttgcccaggctggtctcaaactcctgagctcaggtcatcctcccgcctcagcctcccaaagtggtgggaatacaggtgtgaaccaccacgcctggccttttgaaaagcctttctcaaagaggcaggtggagacaggaaggaggaggagagacggagactgaggaccaagaggcgctgagacactccatagaggcaagacctccatgtgcgactctccccctctgtgcctcagtttcctcatctgtgaaggggggttaatgatgcaccctcatccgcctaaatgccacgatgaggataaagcgagctcattcacgtgaagcacaaagtcagtgctgaccatccttattcccctcgttaacttttctgaacacatcagggacacagagaaaaagatgtcgccttcgagagagatggggcaggagcaagatggggtgaagacgggacagtggggacacggagacagtggccagaaccaccggggccagagccctggacgtcaccgcacagaggtggaggcaggagaggagtgcaggggggaggggacccacaggccaggggggaggcagcgacgcctacccaggctcacagtgggccagccccaggcatgggggcagaggagacccgggattcaccacagagcaagcgaggggcagaggtaccaagccatgtccccgagagcccccagacctagatggcagggaaggacaggatgggactgagagcgcggaggtggtgggggctctgaggctctgtgcagaccccctcgtgtcagcctccgagactgccgggctggttggaggcttccccttcccaatccagcaccactggaagggcaactgctcaggtccccaaggaggtgaggtcacagcccccccacggtgggacatgacctcatcgcctcaggtaagagctctctctccctctctctggtctgtcacagccacccctttcagggccccccaggggccttccccagcaccagctcctgctgggacccaggcctctgaccaccgggtctccgcccctcagggggcctgcttccggctgagtcagtgtggggggcccaaggctgcgtcagtgaggggagagctgacgtagccccccccagaccggcgggaccagccaaggtgactcaggccaccagcttgggggatggactagcccgagggtatgggggactggcctggggccagctggggagcaagaaaagggttctggtaatgccagccccgtccacctacagggaccagagcccaatcccccagcccctcctccctcagacccgggagtccaggcccccaaccccttccccttcagacccaggagtccaggtctccagctcctcctccctcagacccaggagtccaggccccagccattcctccctcagatccaggagtccaggcccccaggccctcctccctcagacccaggagtctagacccccagctcctcctccctcagacccaagagtctaggcccagcccctcctccctcagacccaggagtccaggcccccaacccctcctcctgcagacccgggagtccaggcccccagcccctcctccctcagacccgggagtccaggtccccaacccctcctccctcacacctgggagtccaggcccagcccctcctccctcagacccgggagtccaggcccagcccctcctccttcagacacaggagttcaggcccagcccctcctccctcacacccaggagtccaggcccccaacccctcctccctcagacccaggagtccaggctcccaggccttcctccctcagacccaggagtccaggccctaaattctagttcaagaaaggtagaggaggatcttggggcccttctgcactttggggagcatgtgtggggaaggtaatgggtctgggacaaatctggggtcccagccgctgccagtttcctgtctcgtctgggtccccagccctgggttgtgggctcagactccgtccccgcagtgtggctgcaggaggtacaggtagatggggcgggtgcagagtgacggggctgggagtgactggcaactcctgggtctgcccaggccagggtgggacacattgggctacttctgtgcaaacaagagaaagagagagagagagagacagagcaagagatgaagatcggaaaagaaacccagaggcaggactggggagtcccaagaaaatgacagatgacagagacaaacagagctggagagacaggggcagcaaaggccccaggaggcagccagcgccacggaacccagtggaagctagagaccagcttggaggctcggaaacagactgggcagccagggcccaggccctggggtggtcacagacactgaggagaagcctcggggacatgggggatggccagggagtcctggctcccgcgcggccccggggggaagccgagccggcagggtgtgaggtcagcaggtcccaggctgtgtgtgtgtccgtctgtcagtccctggggggtcccgtctggcctctggggggtgacggggcaggccggccacagaggcagcccaaacctgtcattagcggtgagggccgtgacggcggggcccccccagtcccaagccgcggtccaaggccaggcggccccgccccccaccccctccttgatccctgaggaatcccgggaattgggaagtgggtccagatgatgttgacacaggaaacggtcagcagctgcccggcctcagccccacaacccctctgaccctcacccccggccccctgcagagccccctctaacctgtgtcatctctgacgaaggcagcccggggcccactcagtacccaccaggatgtttacaggagagatgggtaacacggggagtcaccccacggggcttcctgagaaatggggtctggctcctagaccatcctcccagactcacaagttcaggcccccagcccctcctccctcagacccaggagtccaggtccccaggcattcctccctcagacccaattctggctcccagccccatccttcagacctgggagtccagccctcagacctaggagtctgggaccccccagcccctcctccctcagacccaggagtccaggcccccagcccctcctccctcagacccaggagtccgggaccccccagctcctcctccctcagacccaggagtccaggcccccagcccctcctccctcagacccaggagtcccggacccggaccccccagctcctcctccctcagacccaggagtccaggcccccagcccctcctccctcagacccaggagtccgggaccccccagcccctcctccctcagacccaggagtccagggccccagcccctcctccctcagacccaggagtccaggctcccgccccttctccctcagacccaggagtctgggaacccccagcccctcctccctcagacccaggagtccaggcccccagcccctcctccctcagacccaggagtccaggctctagcccctcctccctcagacccgggagtccaggcccccagcccctcctccctcagacccaggagtccaggctccagccccttctccctctaatgcaggtgtctgagtttacaacccccttttccttcagatgcaggacttctagcccagagactgtcccagggagctaagactccctcctcactgtgctgcaaagctgaatggatgagttggggtgcactagggattatggttccaacccagccccccattccggtttcctcttcttggaagccaagttttctctcagtcactggggagtggtggggggaatcaatgtggaagcttcaggatctccgtttagccgactccctcccaccactccctaacctctgttcacagatggggaaacaaatccaggagggaaatgtgggctccctgtccaggagccaccattacagtctccgagcagctctggcccaccaggccctcaaactcagcaggggcccacatggcctgtccccttccctgtttgttttttttttcttttttcttttttttttttgacacagagtctcactccttcacccaggctagagtgcagtggcacgatctcgactcactgtaacctccactttctgggttcaagcaacctccacctcctgggttcaagcaatcctcctgcctcagcctcccgagtagctgggattacaggcaagtaatcaccacgcccagctgatttttgtatttttagtagggacggggcttccccatgttggccagtctggtctcgaactcctgacctcaggtgacccgcctgccttggcttcccaaagtgctggggttataggcgtgagccaccgcgcccagccctatcaccttccctgctaaacattccctagacagcaggcctggcagggctgagatgaaaagcctttctcaagacccctggaccaggagacccccggacttaggctccggccccttgtctcatccccctcccaggtcttctcattgcgggggggactttccctaacaatggggctcagtgaggcctctgtgtctcacagctccccttcccctggttgttaaggcgaaaaactccctagcaacggggtttcctgaaccttcgggccacccgaatccaccttctcaggtatcagtttccttaggaaagaaactccctagcaaagcctcccagttccccacccctcagggcgccccgggtgatatggagacacgccccagactcccacgcccttccagacttctctttcccaccataagtggccaaagaggctcttctaaacctgagacgcccccactcttccaccaggtccctaaagaatcaacaccctagaccaggcatggccaggctggtgtgaagcccttccacgtccgtagcacacccctgactccctagcaacagaactcacaatcctggggcctggcgggcaggcgggcggggccggttgctggggtgatgtcctgtaaggcctcttcccacagtggccccaggggtctggggaggtgacatgttgggctgtgggatcccagcgctgggcctgctcctgctgctgcagggctcggcaggtgaggggctggtgaggcgggggagctgaggagggacgcccggctccacacagccctaacactgccctttctctcgcagacggaaatggaatccagggattcttctacccatggagtgagcagccgctgaaatactgggtcacccagggaggggagcccagatcagacccctgaatctgagggaggaggagctggggcctggactcctggatctgagggaggacgggggggtctggactcctgggtctgagggaggaggggctgggggcctggatccctggatctgagggaggaggggctggggtcctggattccttggtctgagggaggagggctggacctggactcctgggtgtgagggaggaggggctggggcctggactcctgggtctgagggaggaggggctgggcctggactcctgggtctgaaggagggggctggggcctggactcctgggtctgagggaggaggggctgggcctggactcctgggtctgaaggagggggctggggcctggactcctgggtctgagggaggagggggtggagtctggacccctggggccctgcacagagtaagcaccaggaaggcagcctgggagcatggccttggaatctcgtgtatgaggccttcggagcggagcgctgtgatgaagcaagccactggtggttggtccccaggctgtgagggtgacatatgggaccgggagagctgtgggggccaggcggccatcgatagccccaacctctgcctgcgtctccggtgctgctaccgcaatggggtctgctaccaccagcgtccagacggtgagggctcctggccccaggtccctggggcgtgggtctggcggtcgggagccccgggtcttaaccctgcctcccttgtccagaaaacgtgcggaggaagcacatgtgggcgctggtctggacgtgcagcggcctcctcctcctgagctgcagcatctgcttgttctggcgagtgggcctgggatagggcgggcgcctgcacccccagggggagggtccggcggagggcgggggctgagccgtccgctccctgcaggtgggccaagcgccgggacgtgctgcatatgcccggtttcctggcgggtccgtgtgacatgtccaagtccgtctcgctgctctccaagcaccgagggaccaagaagacgccgtccacgggcagcgtgccagtcgccctgtccaaagagtccagggatgtggagggaggcaccgagggggaagggacggaggagggtgaggagacagagggcgaggaagaggaggattaggggagtccccgggggactgctcaatacagatacggtggacggacgtgtgttctcttctctgaaagccgtggggagcagggggcatggtgcacacagaggctggggtaacaggtgggggctggagggggcttggggatggaggcttagggggcgccaggctgtggtcgtgggggtgtgagctgagggggagcctggaatgagagagatctgggaggtaagtggggaggatccgagctgagggggatctgcgctcatgggggtgtcctgggctgtgatcatggggaccctggactgaggggatagaggtgtacgagtgctggagtgcgggtctgaaatgagggagttgggggtatgtgggggtggtggggtctgaggggtgcctggactgggtggggagaggggcacgccacagctgtggaaacgtgcccctcagtctcctacatggagtgccagtgactgacagtgccccccgcccccaccccagatgcacctagattaccatgggttgctctccaccaataactgagcatggcgaggcaaggggtgggggttccgggtacaggtgccttctcgaagggcaggggcctccctcatggacgatgacttcagctcccagctccccaggggccagtggcaattttcttggaggtgcggtacagtctaagactagtcctacccatccctccctccctctccctgcaccaagctaccctacaaaagtgtttccccaagacatatcttgcaagtccagtttgtctctgtgtctgcttctcagtgaacccaaactcacacagggatgttggggcttagagtggagggtctgggctaagatccttatcccccgccccctctctggccccctctgagaaggggccagcataaggctaggctcctatatccccagggctcctggtctccccagggcaggggcagcctcacctcaggtgtggccaggcccacctgggtgctagaaggaagcaagccacctcgtctccattcccaccccagcagggtccctctcccagacagacatgcagcactaaggcaaatctgctttttatccaagtgaggagggagggggtacagggagcgtccgtctggccacggatgtaggggcagctgcacatctcagtctggtcctgacagctggagccaaggggttgtctgcaggagggagggtggagtgagcgactgctcaggaacccctcccatccctgttccgggctctctgcctgcgggggcagaggcagggagccccatccgcctgcccttgccgctcacatggactcacacacttgctccttcatccctgcatgcccccatttgctgagtgtgtgcatgcgtgtgtacctttaacgccctgaaatccaagggtagaggccagggaatgcgagccagggagaggcagaaagggggagacgaagacatgcagaaggggaaaggcagaagcacagggacaaagaaagagacctgggagacagagacacagagacaaagagtgagagagagggagacaggcagacacagtgaagacagaaggaggccgggcatcgtggtcctcatctcagaccctcaccccagcattttggctgcaggcaggaggatcacttgagcccaggagtttgacaccagcctgggtaacataggaagaccccgtctctggtacctgtagtcccagttccttgggaggctgaggtgggaggattgcttgagcccaggaggtggaggctgcagtgagctgtgattgcaccactgctctccagcctgaacaacagagtgatgggggtggctctgcccggctactcatggtggtctcggaggttgtgggggtaccagagccagaacctgtgggtccctctgctaaaattcaggttctctgtctttcatgcgctggaagctgctcactctccccagtaaacaagagtcctgggtttgaacaggcccattttcctctaagtggggcctacgttcgagtcagtgtggtctgagtctttggtggaggctccaagagtggaggcctgtgcagctgtgttagacgtttaagctacgtaaaggattctcctctcctcccctcccctcccctccccccttcccccctcccctccccccttgcccgtcccctcccccttcccccttccccctcccctcccttccccccttccctccctgcttccccctcccctcccccttcccccctcctcccctcccctcccctcctctcctctccttttctttttttgagatggagtcttgctctgttgcccaagctggagtgcagtggcacgatcttggttcactgcaacctccgcctcccagattcaagtgattctcctgcctcagcctccctagtagctgggattacaggcgtccgccaccatgcctggctaatttttgtatttttagtaga[144 bp omitted]tgagacgggttctcactctgtcactcaggctggagtgcagtggcgtgatc[132 bp omitted]tgcttatgtttgcattctatgccaagcttcatgttagcttacgcttcacccgtgcaagcagatgttcatgctttcttaccccagttccttcactgaatcacggcacgtagcatatgattggggtgactatttccccaaatctcacaaagaataatatataactggtagcattctggatgcataggagaaaagttaattccagccgggcacggtggttcacgcctgtaatcccagcactttgggtggccgaggtgggcggatcacccgagatcgggagtttgagaccagcctgaccaacatggagaaaccccgtctctactaaaaatacaaaattagccaggtgtgggggtgcatgcctgtaatcccagctactcgggaagctgaggcaagagaattgcttgaacgcgggaggcagaggttgcagtgagccgagattgcgccactgcactccagcctggacaacaagagtgtaactccatctcaaaaaaaaaaaaaaaaaaaaaaaaagttaattatttacctacatagaacgtcctaggataatagggtttaattcttttaccaaaaccctatttgagagatgaattcagtcacccaaccatccatgtgccattaaatgcattcatccactcatctgtgtacttatcattcagccccaaccatctattcaactacccattcacccatctacctatctatccagagagcgcacagaggctgggcaaactctgactgtcctatggatagtcctatggaccagccgaggcccctgccccaaggagttcccaggtgtaaccgcaagttaaggtgccctggggaggtgacacaggcaccctcatttcttttgttcagtaggagtctctgaggcctccccagtaccatgctgcatgggtgaggccgaggacacagagaagtatcaggaaaagctcttgcccctttatcaggcagggctccctctccaaccatatccattcatggttcattgcccaattcaccacctacccatatctacccattaaacaacccatccatccgtcaatccaaccacatccctgcatcaaccaacccatgtattcacccatccacccacccacccatctgtccattcacccgtccatccacccatccatctacccatccacctatccaaccacccacccatctatgcattcacccatccatccatcaaacaactcatccatccacgcacccatcgatctacccatccacccacccacccatctatcaatctatcatccattcacccatgcatccatcaaccaactcatccatccatccacccatccatctacccatccacccatccagccatccgttcttccatccatccttccacttccctacccaaccatcaacctttcctgatttcacactttttgctgggcaatgctaggaacaaggacgctagggacctaggtcttaccctcaaggcactccctgtcaggtgggagagacagtaacaacatagacacagcacatggccatataagcagcaagaggggtcgctcagacaatatgaagacccagagaagacccagagaaattaagttaaatcttaaacatgtgagaagttttctgggtggagtggagacagccaagggcactcctggtgtagagaagagcaggaacagggaccaactggctatctgtggactaagagacaccattagtgcagagaggcaggagaaatggggccaaaatatggggggtccacaggccagtgagtgcttcagtttaaccaaaggtgaagagggagccacagcaggtctttgagcagaggcaggctagctggaaaggtgtgtttaggaaagagatagaaggtagaggggaaaggggagtgaatgtgtggtggcttcatttctcctgctgttggtccttcttactcctccttttctaggcctacaggtcaggaaaatcccagctcctcctttcctaggcctacaggtcaggagaatcccagctcctcttttcctaggcctacaggtcaggagaatcccagctcctccacctacgtgttgtgtggccttgggcaaatgtggcgcctttctgcgcttcagtttcctccactgcagaatggggatggtaatagtagtgacc[136 bp omitted]catggcaaaaccccgtctctactaaatatacaaaaattagcccggcaaggtggggcgcacatgtattctcagctacttgggaggctcaggtgggaggactgcttgagcctaggaggtcgaggctgctgtgagctgagatcacgccactgcactccagcctgggtgacagtgagagatcctgtctcaaaacaaccccaaacgacaacaaaacaaaacaaaacaaaaaatggggcctggtgtacctggaagctggggctctccccgtgcggggggcctaactgtgtgactcgacccccacacttcccatctccaggggcagggtctcacagcctcccccacgtatgcacctgtgcttgctgtgtctgcggttctccgccagagccttcccgtccctgtctccaccccgccctgggactctacctccccatggccgctctctgtctccatctgtccatcgctcccccgtctgtctccattcccgtccctccctcggtccctccgtctccccgccctgccccgcccgcccctcacctgggcctcactcgctgcccgcgcccgccgccccgggcccggcctcgagcgtggcgagctgcaggcgcacgcggcgggagccggcggcgggcggcgggggcgcgcgggcggctcggcgcgctctccgggagccgggcgcggggcgctggcccgcggcggcgggcgccgaccagcggcgggagagcttgcgcgccaggcgggcgagcgccgagggccgcaggccgtagtcgcgctccagctcctggcgcgagatctcgatgttgccggtgtaccagaggatccagcccagcaggctcaggaacaccagcagcgcgcccgagtagatgagcaggtccccgaagtcgcggccgcgcacctgcagctgcgcgaacacgccggtcagcagcgccgccatgcccgccacatccagcgccacggccagcagcagcgccatccggcagcggcccaggccggccgcgggtgctggcgcggccgccggcgcggacggtgcacccggcgggctcccctgcgaggcgcacaccgctggcgccgccgccatggccctgcaccgccgccgctggcgcccagagagagcgttccggggtgcggcccggtccggggcggggtcaggggacggcgccaggtgtgccaagctcccgcctggtcacctgaaccgggctgggcgcgaaccggcgcggccggggttaccctggtcgtggtttccgtgcaggggctattgctcagaggcctgagctggtggtagccaggcgcacagccacgggtgcctagggcccgtgccacccagggaggtcacatatggccaaaaatcagggcattttagtggtggcagcatgggacactcggagccgggcgtggcgttgtttctgctcagtgtccgcctcccgaagcctgtgcagatcagacagtgcagatcagacaaggcctttagacaccaaggagctctgggacgcgagaaccagtagtcggggtgatctaagaggggaagctccgggttccgcggaagctgagtttccttcactcagcgcgtgtcttctggggtctcctgtgttcagcgaatgaagccacgggcacaaggacggacgagacccatcaggtccagagcgcacccgtggaggaagctgggcgaaccccgactgtcctatggaggatagtcctatggaccagacgaagcccctgccccaaggagtgcccgggtgtaaccgcaagttaaggagccctggggaggtgacacaggcaccctcattccttttgttcagtaggagtctctgaggcctccccagcaccatgccgcgtgggtgaggccgaggacacagagaaatatcaggcaaggctcctgcccccttagggtggccctgacaacggatcataacctcccagggagctgatggggtgtgacaggcacaccataggctggaggcacaggtggagggcagggaagaggaccggcaaatctatagaatcctaaagggagccaagagaagccacatgcaaatctccctccctccaaacaattctcccttagagggcatccgcgctcccctggggtggcagtcagcgagaagtttccgtgtaggttctccccaggcttaaacagtttaagagttttatttcaagaaaaccctggggagggcgaactgcaagagggctgccaggattagccgagggattccgaatgaagacggagtatttccgaacatacacacctctcccaagagcgtttccggagggttccgaaaatacccgagcgggcctcggcgccctcattggccatcaccgcgagggcttacgaagaccggaaatatccaaaggtgccggggctaggcttatatagttcacgcattcaccagttcattcataaaacaaatgtttgttgagcgcccatcatatgccaatcacagtgacaagtgctgggtgagcaatactggagagataacgctgaggtatgggtcccaggacctctcgaattggagccactcggaaatccagcggtagagtttcgaaaacttccgaacggttcccggaatacgctctcggccctctaaccgaagagttccgaatattcccgagcgttgagcgaattttcggcggaagcagccgaacatcatcgagccgcctcggaggtggggaccgacaactcctgtcgtgcccgcccggagaggaagcggaaatgcgtgtacggtattaaaggcgtcgcctcgcccctcgccttcctctttccgtctcaggtcgccgctgcgaagggaggtgagcgttcgtcttcctcgcgtggtcgccatctccggcccgccgcgcactccctctcagtcctctgcctgccttctccccttgcgcctcaagggtcattggcggaccccaacccctccccgtgaagtcgttgtgaattttcaagttattttcccctcactctcattcgccgcagctagtctcggctgcctgaattcggtcccgccgccttaggtcactcagtcccgcctgacaagagttctaggtcgctgtctgccctcaggggtctcccattcacccaagttcccagtcgctctcttcctctgctgtccgagcgtggcccgtggcctaacgctgctttagttctctgtgtctgacgctttccctgtgcccgtttccccgcagccgccgccatgtctgcgcatctgcaatggatggtcgtgcggaactgctccagtttcctgatcaagaggaataagcagacctacagcactgtaagtggggcccggatgcgtggctcctgcgggaggagggtcctgagtctcttgactctgggtcagagggcgggaccttcgcatgtctccgggtcccttattcacgatgccttgtgccgcctccttcccaggagcccaataacttgaaggcccgcaattccttccgctacaacggactgattcaccgcaagactgtgggcgtggagccggcagccgacggcaaaggtgtcgtggtggtcattaagcggagatccggtgagttttgtctggtttgggccagagagcggcccctttcccgggtctgggagctgtgattttttactgtcaggcaggaagagcggtaactgccatcgcggcgggcatccctggcgccagggtgttggtctgggtaccggcttccctctcggccgacttgtcagctctgtgagccgcgcgcgtctgagcccgtgtcctcacctgtaaagtggagaaatgaaaaaggacctgaacttcctcggtggttgttgagagttaaggcacggggttgatgttttcagatgaaattctcaaagcaagtcagggtggggatggatggtttcatcccacaggtgggaagattgaggcacaacaggggaggggccctcgctaccacacttaggaggggacaggctgggttggttgcagccatttgattcccattttgcctgtgtaggttagagaagaggtcttggggaccccactccatacattgtgctgtcaggtgcaggcctttttggggattccctgaatgttcgtgtgagtcgggggtctctaatggaggagtccagcttcacatgtgttcttgacagggctgtattttctttttagagtgagtttttctcaggtccttgattggaactgcctcagagccaagggtccttttactcagtggcagcaacaaacgcagtctgttggctagtgatcctcctgtctcagggacacgtagtccagggagcagccaattgcttggcacttggggaccccgttctggggagtcctgaaagctttcacctcttggattgccgaatacatgggtggcccttcctagactaagggactggcctgagtgaggctgggcctctcagccaagctgatgttgaaccactgctgtggggatgggcctggggttcctgggaagctgttcatacccattgccaggagcgtgggctctggctggacctggatcagatcctaactgaagcggcagctttctggcatgagaaaggagtgttttcatggtggacagaattgggctatgagtgtggcagaagctgtgtcctcagtactccgtgatgacgagtgagcctctgtgaaatggacaggtgggaaaacagctacctgctggcctgcccaggcacccgccacgggcccacgctgctcagcttctcaatgtgagactgtccacacctgcgaggtgtgctaaaggtgcaggttaggtggactgaccccaggacctccctgacccccaaccaggccagcggaagcctgccacctcctatgtgcggaccaccatcaacaagaatgctcgcgccacgctcagcagcatcagacacatgatccgcaagaacaagtaccgccccgacctgcgcatggtgagctggggtttggggatcaggcttggggagactggccagtgctgtggggaagggcctcccactactggttgcaatatgggctggagagggatggattcttgctttcagcctactccccacacccagcattggcctagggggcggcttgtggagtgtatgggctgagccttgctctgctcccccgcccccaggcagccatccgcagggccagcgccatcctgcgcagccagaagcctgtgatggtgaagaggaagcggacccgccccaccaagagctcctgagccccctgcccccagagcaataaagtcagctggctttctcacctgcctcgactgggcctccctttttgaaacgctctggggagctctggccctgtgtgttgtcattcaggccatgtcatcaaaactctgcatgtcaccttgtccatctggaggtgatgtcaatggctggccatgcaggaggggtggggtagctgccttgtccctggtgagggcaagggtcactgtcttcacagaaaaagtttgctgacttgtgattgagacctactgtcccattgtgaggtggcctgaagaatcccagctggggcagtggcttccattcagaagaagaaaggccttttctagcccagaagggtgcaggctgagggctgggccctgggccctggtgctgtagcacggtttggggacttggggtgttcccaagacctgggggacgacagacatcacgggaggaagatgagatgacttttgcatccagggagtgggtgcagccacatttggaggggatgggctttacttgatgcaacctcatctctgagatgggcaacttggtgggtggtggcttataactgtaagggagatggcagccccagggtacagccagcaggcattgagcagccttagcattgtccccctactcccgtcctccaggtgtccccatccctcccctgtctctttgagctggctcttgtcacttaggtctcatctcagtggccgctcctgggccaccctgtcacccaagctttcctgattgcccagccctcttgtttcctttggcctgtttgctccctagtgtttattacagcttgtgaggccaggagtttgagaccatcctaggcaacataatgagacaccgtctctaaaataaaattagctgggtgtggtggtgcaccgcctgtggtcccagctcctcagaggttgagtagaggctgaggtgagcggagcacttgagccaagagtatgaggctgcagtgagcccatgagccccaccactacactccagcctggaagacaccatgacacacagtgaggcctggatggggaaagagtcctgctgttgatcctcacatgtttcctgggcacctaactctgtcagccactgccagggaccaaggatccagcatccatggcacccctggttcctgccatcctggggtacccgattcaaagaaggactctgctccctgtctgagaccacccccggctctgactgagagtaaggggactgtcagggcctcgacttgccattggttggggtcgtacggggctgggagccctgcgttttgaggcagaccactgcccttccgacctcagtcctgtctgctccagtcttgcccagctcgaaggagagcagatctgaccacttgccagcccctgtctgctgtgaattaccatttcctttgtccttcccttagttgggtctattagctcagattgagaggtgttgccttaaaactgagttgggtgacttggtacctgctcaggaccccccgcactgtcccaatcccactcaggcccacctccagctggcctcactccgctggtgacttcgtacctgctcaggagcccccactgtcccagtcccactcaggcccatctctggctggcctcactgcgctgggactccgccttcataaggagagctcactgctcacgttagtagatggccccttctcgtgaggcctctcccctggcacctgcttcagttgtcctccacagcactgatttgcagcccacaagctggcaggtttatctgtctcatgtttgtcttgtgctggtgggcaaggggtttgtctagcacaccagcatataatgagatgcttgatgaatggtgcatattgaatgtataaagcccaccggtcctgagagtttgctcactggagactttctggagatggagtctcgctctgttgcccaggctggcgagtgcaatggcgcgatcttggctcactgcagcctccacctcctgggttcaagcgattctcctgcctcagcctcccgagtagctgggattacaggtgggtgtcaccacacccagctcagtattgtatttttagcagagatggggtttcaccattttgcccaggctggtttggaactcctgacttcaaattacccacctgcctcagcctcccaaagtgctggcattacaggcgctcgaggctttctgatgtggctgctgctgctcagaaggccttgtccttaaccacctccttgcctgccctggaggcttgtgcctctaggccccaccccctgtggagtcctgctggctttctccatccctatctgaatcctccctgctgtgtggcctcccctggtctcatccgtaacacagcccagcttagtgggcctctgttcctgcgggtggccagcctgtctgtgtggctgggctggggaggccacgtctggtatctgaatgctatcggtgggttggggtggaggaaccaggagagggctggagggagggagatggtctcagccccacagagtttggagtcctcagtgtgctgagcaaacgtggagacaccatttccctcctctagacctcatcttggagagagagatgttggatggggccatctattccagctttattcacacaaatcatgtctgttggcctggaaattggaaaaccagttaaaccaaaaacatgatattaagaaaacaggcaggctcaccatagtaaaaatgctgaaagccaaagacaaaattgggagaacaaaagaaaagcgtcttgtcacatacagaaggtccctgataaagttagtagctgccctcatcagaaaccaggcccaggcagtggggacacatccagagtgctgaaagaacctcccccaggtcatcctatccccaagagtgatgcccggcagcattcccagctcagggctaatggttcacggaagccaggaatcaaactgcctgggttccagtcccagctctgccagttatgcccagctgtggggacttgggcagctcgtttagtagcaccgtgcctcagtttcccatatgtaaaaggccattttgagtgcctttcacagccctgcataaggcaggtgtctcagtgttcactgctgtctctccagctcttagtccagtagctgcatggtgagtgagcgtagggcgcaccctggaaggctgccaagcccaaagttgtgcagagcgctggggactccagactccccacagcagcagagactcgggactgaggcatcctctgttcacaggacatgctggcatctactgggtcagggctctgctgctcggtggctgtgcaaccttgggcaagttcctcaacctctctgtgtcttcgtaccctcatctgtaacatgcgtgtcgatagaccctactactcagggttgatgagaagattaaatgtgcaaaacctgcttgactgtgcccacaaatcctgattgtaggaataaattaatgactttttataaatattttgatcagatggactcatgatcacagatgtcttcacatgcctatgactaatttgtacacaaactaatgctcgtgtttcccaagcacctggaagacatgccagatccatgtgcagtaatgcctggtggctccaggtctgccccgccgtcctgtggggctgtgagctttcccagcctcctgcccgtgtttgtgaatatcattctgtcctcagctgcatttccagcccaggctgtttggcgctgcccaggaatggtatcaattcccctgtttctcttgtagccagttactagaataaaatcatctactttaaaatctttcattatgaaatatgcatgtggtcttgaaaaactgcaaatgaaagaagagtatgcaggggaagaaaatctcagaatcccagcccctaagttagccacctgtgcttctcctttttggaaacttcacacatatgcatgcagatctcctctttttgtttgtctaagagacggggtctcactgttgcctgggttggagtgcagtggcgcaatcacggctcactgcagcctctaactcctgggcactctcaattgtcccgccttagccccttgtgtagctgggactaaggtgtgcagcaccacgcctggctaatttaaaaagatattttgtagagacagggtctcactgtgttgcccaggctggtcctgaagtcctgggcacaagcaatcctcctgacttcgtcccccaaagtgttgggattacaagcgtgagccactgcacccagcctcatctttttttttttttgaggcggagtcacgctttgttacccaggctggagtgcagtggcgcgacctcgggtgagctacgcctcccaggttcacgccattctcctgccccagc[224 bp omitted]aacaggaacctcccccttgctccttttccctaatgcactgggctgtctctccatcagcacacacaggctgcgggcccctttcgatggccatcagcgctgcattgatgaagccactcatttaaacacacccctcaatggctaatcccccagaggctccccagcacccctctcctctgttcctcttgaacacctggccctcccccaggcccagccatccctagcatgtctgaatcacacctccagcggccccagctcccaccggcctcccacacccgcccgctcccctgctgtccctccaggctgttctctacacagtagcaaattgatctttacaaatgataaatgagacctgtcatcctcccttggccgacgcacccccccccccccccgacccccatgaggaataaaagcccaaacctttctctagggccagcaaggcccgggatctggccctgtccagtctccccagcctccttaggctgtaatctctgaggcctctctcctccctgaagctcctagctggtccctaggctcagatgaagactgtctccaaaaaaagaaaaaggtataattcacgtaacataaagtccacgcttttagagtgcacaattcagtgatttttagtcttcacaaagctttgcaaccacaacccctatcttattccagaacatttcatcatcctgaatggacacccagtatccatgaagcagccactcccactcatgtcccctctagcccctgccctgccaatcaccaatttgtttttttttttttttttttgagatggagtcttgctctgtcgccctggctggagtgcaatggcatgaccttggctcactgcgacctcagctcactgcaacctccacctcctgggttcaagcgattctcctgcctcagcccctcaagtagctgggattacaggggcccgccaccacgcctggctaatttttgtatttttagtagagacgggggtgtcaccatgttggccaggctggtctcgaactcctgacctcaggtgatctgcctgtgttggcctcccaaagtgctgggattacaggtgtgagccactgcacccagctacaagtcttttttttaaagggacagggtctcagctgggtacggtggctcactcctgtaatcccagcactttgggaggcccaggcaggcggatcacaaggtcaggagatcaagaccatccaggctaacacagtgaaaccctatctatactaaaaatactaaaaactggccagatgtggtggtgtgcgcctgtagtcccagctacttggcaggctgaggcaggagaatcgcttgaatccaggaggcggaggtagcagtgagccaagatcacgccactgcactccagcctgtgtgacagagcgagactccgtctcaaaaacaaacaaacaaacaaaaagataaaggtctgttgctcaggctggagtgctgtggcacaatctcggctcactgcagccttgaactcctgggctcaaacaatcctcccacctcagtctccgaagtagctggcaccaccggtgtgctccaccacacccagctaagttttaaatatttttgtagagacaaggtctcactgtgttacccaggttgggcttgaattcctgacctcaagtgatcctcctgccttggcctctaaaagtgctgggattacaggtgtgagccactgcacctagcccagaatttctatttatttatatatatttttaaaaagaatctcactctgttttccaggctggagtgctgtggcaagatcaaggctctctgtagccttgaactcctgggctgaaacagtcctcccacctcagtctccagagaggctgggaccacaggtgtgtgctgccacacccagctaatttttaaaattgttttgtagagacacgatctcactatgttgtccaggctggtcttgaactcctgggctcaatcctcccaaagtgctgggattataggcgtgagccactgtgcctggccccacccagaatttttaaaacatgaaaaagcttatgttttgggccaatctctaaaatatattaagtgaaaaaaagcaacctgcaaatagtgtaaatgatatgccaacattcctgttaaatatttttaaatatttaaacaataagatgcatgtgtatttgcttgtatatgcatcgaatgcctctggatagtcacaatatgcaaacatttgtctcaaggaaggagagttggaataccatgtgatgaatattagcctttcttttttttccttttcttatttatttatttatttatttttttgagacagagtttcactcttgtcgcccaggctggagtacagtggtgcgatctcggctcactacaacctctaccacctgggttcaagcgattcttctgcctcagcctcccaagtagctgggattacaggcatgcgccaccatgcccagctaattttgtattttaagtagaaacagggtttcaccatgttggccaggctggtcttgaactgacctcaagagatccacccatcttggcctcccaaagtgctggaattacaggcgtgagccactgtgcctggccttctttttctcttttttttttttttttgagacagagtctcttgcactctcccccagtctggagtgcagtggcgccatctcggctcactgcaagctccgcctcccgggttcacgccattctcctgcctcagcctccctagtagctgggactacaggcgcccaccaccacacccggctaattttttgtatttttagtagacatggggtttcactgtgttagccaggatggtctcaatctcctgaccttgtgatctgcccaccttggcctcccaaagtgctgggattacaggcatgagccaccgcgcccagcctctttttctcattttaaagataaaaatttctataatgaaatggctccctttcattcttgtatctgggacaaccagttcccttgatcagggacaaccaatgttaccaggttctcgtgtatttttctggagaaattctatgcaaatgcaaggaaatttatatatgtattcttttgcccccggcttccttacatgactggtagtgtcccatacaaggcatattgcaccttgcttttttgacttaacagtaacctttgtctgagcgcggtggcacatgcctgttatccttgcactttgggaggctgagatgcgaggatcccttgagcccaggagtttgagaccggcctgggcaacacagtgaaattccatctgtacaaaaaaattagctgggcgtggtagtgtgcacccgtagttccagttccttgggaggctgagattggaggatcacttgagcccaggagtttgaagttgcagtgagctatgttggcaccactgcactccagcctgaacaacaagaatgtaaacttgtaaaaaaaaaaaaactttaaaattaaaaattctgaaatacagcatacacacagaaaagtgcataaaatgtatttatacacttaaaaaatcataaaacacctatgtaaccaatacccaggtcaggaaatggaagactaccagaccctcaaaccacccaagtattcaaccctggctggaggtaaacagtattctcacttttaggaaagttctcccccctcccctccccacccctcccctcccctcccctccccacccctcccctcccctcccctcccctcccctcccctcccctcccctcccctccccatccctcccctcccctccactccccttgtttttttttgagacgagtctcactctgtcacccaggctggagtgcagtggctcactgcaagttccacctcccgggttcacgccattctcctgcctcagcctcccgagtaactgggactacaggtgcccaccaccacgcccggctaatttttttgatttttagtagagacagggtttcaccgtgttagccaggatgttctcgatctcctgaccttgtgatccgcccgccttggcctcccaaagtgctgggattacaggtgtgagccacggtgcctggcctcccttccctttctttctgaggcaaggtctggctctatcgtccaggctagagtgcagtggcacaatcttggctcactgcaacctctgcctgccaggctcaagccatcctcccacctcagcctcctgagtagctgggactacaggtgcacaccacagcgtccagaaaatttttgtgttttttgtacagacagggtttcgccatgttgcccaggctggtctcgaacttgtgagctcaagccatctgcctgcctcagcctcccaaagtgttaggattacaggcgtgagccactacacccggcctccttgttttcttttatagtttaccaccaccatatgtatgtttagcaggagaatttatttttgcctatttttgaattgtgtatgaaggcattcaagctgtagtatcttttgtgacttgcttagttttgattatgtttgtgctgtatggtattgtttcttaaatatacaagcatgtttctgctgtttgtaatcgggacaaatgtttttgtttttgttttgagacggagtctcgctctgtctcccaggctggagtgcagtggcgcgatctcggctcactgcaagctccgccttccgggttcacgccattctcctgcctcagcctcctgagtagctgggactacaggcgcccgccaccacgcccggctaatttttttgtatttttagtagagacagggtttcaccgtgttagccaggatagtctcgatctcctgatcttgtgatccacccgcctcgacctcccaaagtgctgggattataggtgagccaccgcgcccggccaggacaaatgttttaaacctgttgtgtatgtccaagtacatgagagctgggcatggtggtgcgtgcttatagtcccagctactagggaggctgaggtgggaggtgggaggtgggaggtgggaggtgggaggatcagttgagcccgggagtttgagtccatcttggacaacatagtgataccgcatcttcttaaagaaaacaacctg[133 bp omitted]gaaaccctgtctctactaaaaatacaaaaattagcccagcttggtggcacacgcctgtaatcccagctactcgggagtctgaggcatgaaatcgcttgaaacctgtgaggcagaggttgcaatgagctgagattgtgccattgcaccccaggctgggtgacacagcgaaactctgtctcaaaaaaacaaaaagaaagaaatgggaatgtgaatttctagagtgggatttgggcttgagacgcaggaaggagttaccccggcatggatggttgtgaagaaatagaaacaaagggaacctcgatgtaaatgaaaaccaaaccgaaaccaaaaaggttgttgagtaataagttgagttcttttgacttgactacaaagtttcaaaatgggctttaccatctcactgttccaactggagtctataggagttcctagtgctccgccaccttgccaacacttggtattctcagatttaattgttgtttttctaggagtataatggcatcaatcttggtttacatttgcatttttccagttactaatgatgttgagtacctttacatgtgttgagtaaccatttggatttcctgtgttgtgaagtgcttgttcaagtgtttttgccaatttttcatgtttttttcttattcgtttgtaggaactctttatacattttgttgcgtgtgttgaggggagtggcgggggtgttgagacagagtctcactctgttgcccagactggagtgcggtggtgcaatctcggctcactgcagtctctgcctcctgggttgaagcaattctcctgcctcagcctcctgaatagctgaggctatgggcatgcaccacaatgcctggctgatttttatatttttagttgagatgaggtttcgccacgttgggcaggctgctcttgaactcccaacgtgaagtggtccaccagccttggcctcccaaaatgctgggattacaggtgaaccaccgtgcccggtttgttttgaggaagggtctccctctctcacccaggctggagtgcagtggtacgatcatagctcactgcagcgtcaacctgcccatctcaagtgaccctcacacttccgcctccgaagagctgagattacaggcgcacactaccatgcctggctaatttttttcttttcttttcttttcttttctttgagacagagtctcgctctgtcacccaggctggagtgcagtggcaggatctcagctcactgaaacctctgtgtcccaggttcaagagattctcctgcctcagccttccaagtagctgggattacagacatgcaccaccacgtccagctaatttttgtatttttagtagagacagggtttcaccatgttggccaggctggtcttgaactcctgacctcaggtgacctgcccgccttggcctcccaaagtgctaggattacaggcgtgagccaccccacccaaccttgtttagtgttttaacggaggtttcattacatgggcatattagacaaatcattgaccattggtcattgacctcaaccttcagcccctctcttcccagaggttggtaggtatgggtggggctgaaattcccaactgtctaattcggtcttggtatttctagtgaccaacccccttcctgaagctacgcaggggcccatcacagatggcttcattaggacaaagactgctcctattaatacccaggagattccaagggattgaggaactctgtcagggctaagggcaaatattatttttattatgcacttcgctaaattatttcagtgggttccgaggcccaggatgcaggcaccttccttcagcaaggactgtttgcttccctcatgcagaaatggttgacgataaacgcagagcttaagatttcttggatggccagtgatgtgaatttgatctgaaaatctgaagggtttcttcccttgtctttccttcgctccctgcactgctagaggtagagaggagtgcagacttttggttccttttctcccttagcttgggagattgtcactggaggcaagggctcaaggaagggtcagacccctttcagaggctgagccgtttcaacctcagctgttttattagaataggcaaattctttcaggacaaaagcagcctttgagttttccactctcctatgggtcagaacttgtagatttttattgtaaatgtattttactttttgtagagatgggatctcactgtgttgcccacgttcgtctttaactcctggcctcaagtgatcctttcacctcctaaagttgggattacaggcgtgagccattgcgcctggcctatttttaatttttttaaaattaatgagacattggtctaaataacctaaacgcattaatagaatgggaagtttccccaccccctggtgtgcacacccaggttaatcccttccccttgagggcagaaactaagactaagctgggatcttacccctgtgatttagtcattatcacttaagtatctggatgggcctgacctaatccggtgagcacctcaaagggaatgggcccttaaatcagacctgccagggcccaaggaggggcagcttcttggagctaagaccctagttctacgaggactgaaatcagccaacaaccatgagcatggaagaggacccagactaaggaacaccaacaaccaatacctcaattttagcctgcaaagcactgagcagagactagctcagccgtgtccagacttccaacacaaagtctgaagtgggtgttgttttaagccgctggctttgtgatctgttgtgcagaaatacatgtgggaacaggctttgctgcccacaagggaaaaaccaatctttagcacaaagcaggatcagatgattcaaggggaccgaaccttggcccagtccagaaccagacagacgaggcgagcctcatgccagactgctggcacctggccgtcctgagcaggaacaccactgccacaccaacgtggccattattctagagggagaagtatagggcagtgccgctcaggccaccaggagcagctccaggtcctcgccccattttagattggaaatctgactccaaagaggggttgtgaccgctctacctccacagaacaaagaggtggacccaaacctcaaacagcaaggctggtgagctagatggacccactgctgcagtccatgaggctttacaaggacccagggcctgtgcaggggagccaaactcccagagccacatggcaccatgcagcggtcctggggcatctgtgagacacagaagctgcttttccaactttatttagaaaaacaaatccaggtcccagtgccccctgtaccctccccgaccccagccataatttaaataacttagagacagagttggagggaggggacaggagaggttggggtcacggtggaaggaggaagagagcccactacagccgccgcagcgcccgcttcttgtccgtctttttcttggccgccagcttcttatcgcgctcgccagcatgcttcttggccatgggaccctcagcccctcccgggccccctggggccccagggtcggtggaggaagcttcagtgccactggccagggcccgaccggcttcggccctgccgctgggcccgccggcgcccccgtggatctctgtgagcagacgggcccgagccgcatactcctcgtagttctccaagagcaggcggcccgcctcctcgttgagtgcagactcggggttagggtggatcagcaggcacttgatggtctgtgggaagaggctcagggtcacagtgggtcgggcaacctacagggacccccaggcctccacaagagggtggcctccgcactggctgttccttctgctcccaactcagctgcagatccaggccccacctatgctgcatcctccctcatctttgctcctgtctccctcagaggccaccttcatgtgacctgcctcacagcagatgttcccaaaaggacacgatgccataggcccaatggtttaaaatgtccctggtcctccgtggaacttgctgggtaacgggggaaacgccaaggccccctctcaggagtccattacttgcctgagccccagacttgagtcctattatggttttgaatttgcctccatgcagttcagcatgaccttagaggccctctggttcaacgagtgaggcctgcagcctggacagagagaagagacttccccagggcctcaggatttgaggaaatcacacctgcgtgttggactctaaagctccccatctttccagatacagcataaatcctgacctctgtcttttatcagacatccgaagttcacagcctaagactctagctgggttggaccacacacaagagggcaagacaccaggactgctggctgaggtgcacttcgagggtggtccagagattcctctcaacccccttcacagcccgtcctgaggggtaaattggagtgcagaggtgtgacctgcagccaggcctccagcagccccagctggatcctctgaagtgggtctgggcaaactggccacagcagtttgctccctggggccactatgacacatacacagtacctggctcagcagatgctcagcagatatcactgatggtgaccaggacacaggttcccaccctaattctcatcactgcacccaaactgcaggtctggctgctcttcttgctggctgagcccctgacaggcccagatgctgacctagcagcaagtaggcctggagctcggtgccaatgtccccagcagcctccaatgacaccccaggggaagggaggcggtacatgtgggagggaagggtttggggtctgtttaccttggagctcaatcctctccctccccatggcaggaaaccccaattccccaccctctctgccatgtgccccagggactcattagaaatttggttaacttttttttttttcagcttgcgggaagggttgggaggcagcaggctgtaagcagcctggagcaccagcctagaccaggacgcctccacctcagcaacaccgcagccaggtcattctgtgtcatggagccatctcgtacgctgcaggatttgggcagcacccttggcctccacccactagatgctagtggcacccccgagttgtgacaaccctttctggtctcctgacaatgcataataccccttggggggcaaaatcacctctggctgagaaacactggtttatgaaccctatcgctattaaaaaaccactgaactgtatactttggaactgagttttacggcatgtaagctcagctttagcaaaaaagcctctaatgagaccccatctctgcaaaccataaaaatataaaaactagctgggtatggtggtgcatgcgtgtaataccagccattcaggaagctgaggcaggaagatcacctgagcccaggagttcaaggctacagtgagctatgactgcgccactgcactccagcctgggcaacaaagagccagtatctttaaaacaaaaagaaagaaaggaaagaaagggaagaaagaaaaaggaaagaaagaagaaagaaaagaaagaaagagcttctaactagacccttgacctccacctgtcagaaaactgtcctacagggtaggcgcagtggctggctcctataagcccagcactttgggaggccgaggtgggaggatcacttgagttcaggagtttgacaccagcctgggcaacaaatgagaccccattcctgttttattttttatcttattttttttttttttttgagatagagtctcactctgtcacccaggctggagtgcagtggcgcgatctcggctcactgcaacctctgcctcccaggctcaagcgattctcctgcctcagcctcccaagtagctgggattacaggcatgtgccaccatgcccggctaatttttgcatttttagtagagacagggtttcaccatgttggccaggctggtctcgaactcctgagctcaagtgatccaccacacctggcctaccctatccttgttttttaaaaaaaagggagaagagaaaaaccatcctacaatacaaactcaccactcgttgcatagtaaggtgctcctgggcacttctcaacagtacttgggtgtcctgggtctggcactgtttgtctttccaggaaagctagcaacatggatttttatgtggaaaccttcaaccacttcagagttgattcagaaaaactaaacaaagcgctatggctcagacaccagcagacctccagaggcaggaggcaggaggcccagccccagcccagaactcaccagcagtacgtgtcggatgcccagctcagccgtccagtccctcttgagcacgttgacgcagatctcgccattggcgcccacgttcgggtggaagatcttggtcaggaagtagcccttgggtggggaggcagggaagtccttccccagcaggagtttcatgcggaacagacctccagcatatggggtcccctctggagtggagggaggggtacagggtcagggcactcaggagtcccaaggcacctcaacaccccaaagtccagtctccacggtctgattgtgatgcaggtgggtgccccgccaactctgccaacagactggaggattctttttttctttttttgaaataaggtctcttgtgtcacccaggctggagtgcagtggcacaatctcagttcactgccgcctgcaattcctgggctcaggtgatcccatctcagcctgccaagtagctgggattacgggcatgccaccaggtctggctacttttttattttaagagatagggtctcactatg[220 bp omitted]catggagaaaccccgtctctactaaaaatacaatattagccaggcgtggtggtgcatgcctgtaatcccagctactcggaaggctgaggcagaagaatcccttgaacccgggatggggaggttgcagtgtgcggagatcgcgccactgcactccagcctgggcaacaagagcgaaactctgtttccaaaaaaaaaaaaaaaaagccaagcgcggtgcctcacacctgtaatcccagcactttgggaggctgaggcgggcggatcacaaggtcaggagttcgagaccagcctggccaacatggtgaaaccccatctctactaaaaatacaaaaaattagctgggcatggtggtgcacgtctgtaatcccagctacttgggaggctgaggcaggagaactgcttgaacccaggaggcagaggttgcagtgagcagagattgtgctattgcactccagcctaggcgacagagcaagactccgtttagagagagaaaaaaaaaagagcaagaatggctgggttcctagggggccacaggacctcccccaaaacctcagagatgatgcccatcttgcagcccccacctgtgtcactatcaagctcgtctgcaccctcctggatcccccgtctcagcccaactgaccactccagtcacaggcccttcccaggtggcagggacccaagtacgcactttcctataagatgcccatttatatgcctttcagatcaaggatccaactgtctgttaattccacagcctcccaacccagtgaacgcctctcccactcacccacttgcttgggtcaaaatactgtccctcccctagcccatcagcagcctgagcaccggcctgctaggtcctcccctgaatctcatcccatctccaaggctagcttcctggctggcctctgggttcttccccctgccaggccggctctcctcactacagtcaataggaactttggagggatttgtcacacccctgctttaaaccttccaccagcttcctctacaaactccttgaagaggcctagaagccctaaaagagcttggcagcttcatcatcaactttcttcatgtgtttttaccaagcgcccagctccacctgcccaagggcctttctggagccttcctattgtcatgatcccgcgccctctgcagcaaggcatgaaggacctcaactgtcaccgctgccaggtctttcctgaccacctaccaccatcaccaccgtggactagaccattccttcacaggctctgctcaaatcctgactttgtaggaattctggtgataacagaaatgtagcctgcatgaaacagtattctaaatcactccgcaaatcatgtgacccgcaaatcattcatgacccgtctccccacgatctgcatctggcttgtttcctcatccctgacactcacagcaggatggagtttgagatcacctggcccaccctcccaggcccttgctgacaccattcccaccacctggagctctcttcccattcctacttaattcctacccaccctcaggtccagggaagccatgtctgaaagccttgcttcaaatctagagtaccgtcccatgatatactaactcaatgaccagatatttctcaacccttgtgggaaaagagtacataattgtcatttgtggcgtcctgccctgtccaccaatgcatcccaacacctgacacgaggccagcctgtaatgggtacttcccgctagggtgatctagagcagggtgatggaggatctaagcagcagccccttctctttttccttccaaactcaccagggccctcgatggtgacctggaggtcggtgaggtcctcctcgttgggaaagaccttgatgccatcgggtgggtctgcggtcagtgtcgtcacctccttgtacaccaggcggatgatgtgcgggggtaggttctccacgttggagttctgggcacggatgggagagcagggtgagcgagtgttaagagctgggcttcccgcagggcctaaagatgctgagactgcccaagtcttgactcagtggccccaggctgtcaatcacccttgaactcccagaccctcacccaggatgcttcaggccatcagcccaggcagagtttccaacagaaatgggggcgggttcacgggggggcttgcagataactccacccaccccagaaccccccccccaaagcccgctcctaaccctgcttggtccccagtggttccacgtaggccagagatctactctctcccccttctccactaatttttggttagagcatccttgaaaccccggctcaggtctggagatggcggcggggcgtccttgctcctggtaacacccatgggcgggccgcaaagcgcccggagccctcgccgccagggagactgcgggccgcccgagctcctgctccgcctgcgggaaggccctcgggcccatcccgggtcagggacccccaggctggccctcaaacccctcaaggccgcccgtcggaggcccctgagactccacctcctccctcagggacacccccgaccaccttcatgggcctcatcgcccgtgctcaccatggctgcggccggccgggggcgggtccccccggcccccttcctgcgttcttcggtccgccggccggggcggggggcccaactgctgccgctgcggccctggagaggccccggcggccccgctccgctccccgctgcctccgacgtccgccgcgcacagcgtagaccaacccgccgccccggtgcccggcagcactgagccggccgcgcgcgcaccactgcctctttataaccgcccgcaggccacgccctccgcggcccctcagctccgagcctcaaccgtgacgtcagcgcgcacgttccttggttttcgacgcgctcgctcccttccccgcaaactatggtcagaagcgagggaagtggcggagagggctgggtagcgggccggccaatgggggcccgcgggggtcgggagggttctcaaagaacggaggggctgaaaaggggaagaagagaggaagggggacggggaaggcgacgcggccgctgattggaccgtttgaatgagacgccgccacggcccggcatacgcgcgggcgcgccctgacgctgaggaagtcgcgcacgcgactaacggtcttcctgggggccggagcgtggcgaggggaggcgggactcggggttttaaacgcgtgatggaaggcgctcgggccaatagggatgcgctttagtgactggtgggtcacgagactcgcatgggccaatgactgatagagaccggtcagagggcgacccagtttcgtgcagatcaaaccgctgccagccaacgaaatccgttgatttttgtatatgcaaatgaagtgtgcgctgccgcccgcgccccctcctttgagccgtggtggaggtgggcgctggaactccgactacatttttctatgaggcgccattttgtgctggaaatgctcttggacccacgtcctgtattgctaaggctcaaagatcagtcagaatgaccttgaaggcttggacagccttgcactccgtgtgtgacccccactcctgccaggcttcatcgaagacgccagcctcagtttccttatgtgacaaatgggcactgggatccgttgtattgccagggaaagaagtcagagagtgccaagacggttattcacggcatggttatgcctatgactgacccatggcctccagccacacccgccttctctgggactcagtttccctctctaggaaatggacacatagctgcctggaaaagggaccatctccagccctcagtgtcagtaaaaacgtcaggcaattgcttgagaacggtggccagagctccctgagcaggccttttggaggggcttagagaggaggagggaatgctgaagttggccttcctttgctcatctgtgcagtgcggtcgcagtgccctctcggtgtctctgccagtctgtgcgtccacagctcttcttagtttcttggcctttttcagccatggatgagagcattaacatctgggcctaatttggccacaggtacctgaaaagacccctggctaccagcttcccctcatggggcctcagcttctgaagaag[133 bp omitted]catggtgaaaccccatctgtactaaaaatacaaaaattagccaggtgtgttgatgcagccctgtaatcccagctactcgtgaggctgagatgggagaatcggttaaagccgggatgtggaggttgcagtgaactgagatctcgccactgcaccccagcctgggcaacagagcaagaccctgtctcaaaaaacaaaaaagcaaaaaaaaaaaaaaaaccaaaaaacaaaacctacatggtcgggtacagtgactacgcccataatcccagcactttgggaggccaaggtaggtcgatcacttgagcccaggagttcaagaccagcctgggcaacatagtgagagacccccaccaatatgtacaaaacaaacaaacccaaaacaactgaagaaacagctacagcataaaaagtcatcatcataactagtttgtggagaaatggcttcaggtgatcccttcctgctccctcaccccaggtccaatctataccagttcctgttgacgtcatctactgaatctcatcacgtccccccatccgctatgccaccagtcctgcttagagtcaacgtcatcccattttgccgataagcattttgctgatcttcaattttagcctgctgggtgtggaggattccaacccaattaacagacaaggaagctgaaggagcaggaggtaaagtgacttgctcggggttccccagctgggacaaggcaaagctagtggctaaattcgtcttgatcttaaaaatccacccaaaagacataacaataatgatgataatactaatggttattatgtattatttgctgtgtgccagaccctgttctagtttctttacatgcttgatgtcatttaatccttgtaacaaccataatgggtggatattattaattattatgatcccctctggatacctgcatttattcaatacatttgttcttctttattagtgtctacactctagctgtcaggatgctatgggatacagcagagaataaaagggacaaagcctcgactttcatggatcttacatcctggtgcgggagccagatagcaagtaagtctataccatcatgtcagcaagtgataaagactgaagaacaatcagcaagtgataaagacaggaacaattagtgggagggggaggtttgagagggagggatggggctgccattttaccttggctgggcagggagaatctgtctgaggaaaggtcatttgggctgttggaaggtctatgggaaaagcattttgagcaaagggaacagcaggtgtcaagaagattgtgcttggtgcttttagggaacattaggaggccagcgaggctggattggagtgaggcagagcaagtagagggctctgaggtgggagaggtgaggggctgctggtgggcctcctaggccatggtgaaaagtatgtctgttttttgagcaatggggagccattggtggctttgagcagagaatgactccttcagacttatgaacagaaacagggaggccaatgaggaggtgattacctttgttcaggtgggatgatggtggctccaagcaggattggtggcattaggaatgggggaagtgatgagatgatgtcaacagcaactggtatagattggacttggggtgagggagcgggagggatcacctgtaccctaaataatcacctgaaaaccgggaaggcagaccttttccaaaaaggttttccaatgctgtggtccattggtctctggtccaactcactaaactctgcccttgtagctcctaagaaaactaatgggtgtgtttccaaaaacaggcagtggccaaagtaggcccctgagctatagtttgctccctgctttacacatatcccacgtgccccaccccagctgaaaactcaagagtcctcctccccactacattttgcataagccccagactccccaaaaacccataagcccttgcaccatctcctgaggcttccttgcctttttctgtttgttcctggaatacgccaagctttttaccctgaggacagttggacaggcagttctctgtgccggtcgtgcttttcccctttccttcttctcatctcctaggtttaccctaactcgtcaccccttcacggcagcttctctcctctttcctcccctcccatgctctctttgcttcatcctctttgaacttcatgatctatcaggatttgcaattatttgcctgattgtgtgtttgactcttcccaactagaagattagccccagcagagcagggatcttgtcctcagtccctagcagggcgccagacagactgaagatgttatacattcaaccaatatttattgagcacctactatgtgccaggcaccaatctgggtgcttgggatttatcagagatcagatagacaaagatctttgtccttgggatgcatcagataacagatagacaaagggcttactgtagttgaggaagacagaaccaaaaatgaaacataataaataaggaaaacatggtattttagaaggaactacatgttgtggtaggtagggaatactctctgttaaccatgtttttcctctgctctcatgccacaataatcaactgatcttcaacaaagcatacaaaaacataaaatggggaaaggacaccctacccgataaatggtgctggggaaactggcaagccacatgtagaaaaatgaaactggatcctcatcgctcaccttatattaaggttggtgcaaaataaatcgaggtttttgccattattttaatatttgcaagctatacatctgacaaaggactaatatccagaatttacaaggagctctaacaaatcagcaagaaaaaaaatgatccaatgaaaaagtaggcaaaggacatgaatggacaattctttcaaaagaagatattgcaaacagccaacaaacatatgaaaactgctcagcatcactcattatcagggaaatgcaaattaaaaccacaatgagataataccttactcctgcaagaatggccataattaaaaaaaaaaaaaaatagatgttggcatggatgtggtaaaaagggaacacttttacactgttggtgggaatgtaaactagtacaaccactatggaaaccagtgtggagattccttaaagaactgaaagtagatctaccattcgatccagcaatcccactactgggtatctacccagaggaaaagaaatcatatgcaaaagacacatacacatgcatgtttatagaagcacaatttgcaattgcaaaaatacggaaccaacctaaatgcccatcatcacccaatgagtggatacagaaaatatggtatatatacaccatggaatactactcagccataaaacagaaaacagaatgaaataatggcattctcagcaacttggatggccattattcttttttttttttttagactgaatctcgcactgtcacctgggctggagtgcagtggtgtgatctcagcttactgcaacctccgcctcctggcttcaagcgattctcctgcctcagcctcccgagtagctgggattacaggcgcccaacaccaagcccagctaattttttgcatttttagtagagacggg[145 bp omitted]aaaatcaaataccctatgttctcacttataagtgggagctaagctatgaggatggaaagacataagaatggtacaatggggccagccattgtggctcacgcctgtagtaatcccaacactttgggaggccaaggcaggcagatcacttgtggtcaagagtttgagactggcctggccaacatggtgaaaccccatctctactaaaaatacaaaaattagccatacatgttggtgggcacctgtaatcccagctactcaggaggctgaggcaggagaatcaccttaactcgagagatggaggttgcagtgagccgagattgtgccactgcactccagcctgggccacagagcaagattccatctcaaaaaaaaaaaaaaaaaaaaagatacaatggacttcggggactggagggtaagattgggagggggtgagggataaaaggctacatactggatacagtgtacactgctcaggtgatggaagcaccagaatgtcaaaaatcaccaccaaagaacttatccatgtaaccaaacaccacctgtacccccaaaactattgaaatataaacaattaaaattgtgatgatggtcgcaaaactttgtggatatatactaaaaaccattgatttatgtagtttatatgggtgaattctatgatacatgaattacatctcaattaagctttttatcttttttttttttttttttttttggagacagggtcttactctgtcacccaggctgtagtgcagtggcatgatctcatctcactgcagcctccacctcccaggctcaagcaatcctcacacctcagcctcccgagtagctgggactacaagggtgcaccaacacaccaggctaatttttgtgctttttatagagattggttttctccctgctgcccactctggtctcaaactcctggcctcaagcaatccatctgcctcagcctcccaaagtgctgggattacaggtatgagccactgcacctggcctaagccttttttttttttttttttggtaagaatttaaaaagttactgtgatgggggaaactcaaagaaagtcatagggatgggagaaagagagagagagagatctgagggacagtgttccaagttgggagaggtggccgggaagggctaggctctgcagactccagaaggccaccgtgaagagtgtgcgtgagctctagggagctattgaagaggtttttttttttttctttttttttcttttttttttttgagatggagtctcgctctgtcgcccaggctagagtgcagtggcgtgatctcggctcactgccagctctgcctcccgggttcacgccattctcctgcctcagcctcctgagtagttggaactacaggcgcccaccac[138 bp omitted]cctggcctattgaagagttttgggcagaggggtgactggatttggtgctcatattgggactgtagctcagggctgctggtagagactggactggagggtccagattggaagcagaaaatccagcagcaagtggactgtggcttggcgagggtggcgaccgtctgggaaaggggtggagggaagggagcagatgtgagaactaatcagaaggtggtctagtgataggcagccttccaaatcctttgggagacaggaattgtcagaggatgggattgggaaggggcaccctttctttgctaagtactagtaacccatgaactcgcttttgttcagggccgggcgtggtggctcatgcctgtaatcccagcactttgggaggcctaggcgggtggatcacctgaggtcaggagttcaagaccagcctggccaacaaggtgaaaccgcatttctaccaaaaatacaaaaattagccgggcacggtggtgcatgcctgtgatcccagctattcaggaggctgaggcaggagacttgctttaatctgggaggcggaggttgcagtgagccgagatcacgccactgcactccagcctgggcagcagagtgagactctatctcaaaagaatttacttttgttcagtgaaacctaaattgtccctttggcttgaattctggtttcagaaattaatcttcatttctgtccatctgtattaaattacaaaagaaataggtgtttggagggaaatccacagttactgaggcatgggaaatgaaggctggaggtgctgctctagccctccttcccctcctaccctccacatccacacttctctccgcagcccttcccgtccacatcgatcagtagccttcaattaaactgctgcacagcaagtgtcactcaatacaatcacagtatagagcaggtgcagtggctcatgcttgtaatcctagtactttgggaggcctcagagagaagatcatttgaacccaagagttcaagaccagcctgggcaacatagggcaaccctgtctctataaaaaaataagaaattaattttttttgagagagagagtctcaccctgttgcccaggctggagggcaatggcgtgatctcggttcactgcaacctccacctcccaggttcaagcacttctcctgcctcagcctcccaagtaacagggattataggcacgcgccaccacgcccagctaatttttgtatttttagtagagacagtgtttcaccatgttggccaggctggtctcaaactcctgacctcagatggtccgcctgcctcggcctcccaaagtgctgggattataagcgtgagccaccgcacccagccaaaataaaaataataaaaaaaaaagttagccaggcttggtggtgtatacctgtagtcccagctcctcgggaggctgacgtgggagaaacacttgagctgaggaggttgaggctgcggtgagctgtgttcacaccactgcactccaacctgggtgacacaggaagaccctgtcgcaaaacaaaaacaaaaactctcaaaaaacaacagaaaaggtcaaagatcccactgtagtttcatcgtactctctgactgatgggcatcaaggctgagcccagcgcatggctagacactgctgtgagcatcctccttcatctgttcatctttgggtacagccgtgaacatttccgaaggacaaagtcttaggggaactttcaagatcaaagagaatgcgtgcttgccattctgcccagtggcccttggcagggttctccttatttggattcccaagatgtgacttactcgtttaacccgtatttctttagcaccagatatacaccgggcactgttctgggtgcttgggacacatccgagaacaagataggaaacaaaatccctgccctcctggggcttccattccagcggggagactaaaagtcttcctgggactgagtggcagcccaggatgcaggcctttgcatgctcacactggggaagtcctgggctaataggtaagtcaagttggtagtattaaaagatattggcaatgcacagtggctcatgcctgcagtcctagcactttgggaggctaaggcaggaggatcacttgagctcaagagtttgagatcagcctgggcaacatagtgggaccctgtctctacaaaaaaattaaaaattagccaggagtggtggcacatgcctatagtcctagctacttaggagggttgaggcagaaggattgcttgagcccaggaggttgaggctgcagtgagccatgatcacgccatggcactccagcctgggtagcatagtgagaccctgtctgaaaaatagaataaagatattaattgctgtaaatattagtgtaggctaaggaggttcaggaatgttgtgagggggacagttttttttttttttttttttgacggagtcttgctctgttgcccaggctggagtgcagtggcgccatctcggctcactgcaacctctgcttcccaggcagagattctcccaggagaatcaagcagttctcctgtctcagcctcccaagtagctgggactacaggtgcgcaccaccatgcccagctaatttctgtatttttagtagagatggggttt[142 bp omitted]tgttgcccaggctggggtgcaatggcgtgatctcggctcactgcaacctctgcctcccaggttcaagcagttctcctgcctcagcctcccaagtagctgggattacaggtgtacgccaccacacctggctaattttttgtgtggttagtagagacgggctttcaccatcttgtccaggctggtctcgaactcctgacctcgtgatccgcctgccttggcctcccaaagtactgggattacaggtgtgagccactgcgcctggccaagggggacagttttaaatatggtagaactaattgagaaggtaacatctgaataaagattcaaatgaagcggccgggcacagtggctcatgcctgtaaacccagatcccagcactttggggagctgaagtgggtggatcacttgaagtcaggagtttgagaccagcctggccaacatggtgaaacctcgtctttaataaaaatacaaaaatcagtagggtgtggtgattcgtgcctgtagtcccagctacttgggaggctgaggcaggagaatcacttgaacccaggaagcggaggtggaggtggtggtgagccgagatcatgacactgcactttagcctgggtgacagagcgagactttgtttaaaaaaaaaaaaaaattaaaggaagtaagagagcaagttttgtgggaatccagagaaaagccattccaggcagaggaaactgccagtgtcaaagtcccctcacaggagtgagcctgacgatgagcagtcttcaaaagattccacatcatgggcaagtcaaggtgtcccatcttttatttgcatctcctttcttcccagtgaggttgagcatcctttcctgagtttctgtgtctgctagtctgtggttggtagcaggttctctgctccttagttcctgagtacttctgagcagacacttgtgaccttcccagcttgaggggtctgcacacgctggggtaggtaattgacaaaaactactttcctctgtgcctctggagctgaacttggaactctcctgggtgggagaggccctgatcaatgcaaaaataggcccttaagtggatcgggtgctccctctagtgacagacacagcagtaattaaatgcattacccggggccaatcctgcttcgcaaatccctgagcacaaggcagagacttcttgagtgcactaggaatttcttgtaatgactgtacaaccaacactggtgacgcacaccaagcttaaacagaaaaatgcccagtgctggggagggtgggagcacacggacattttcacatacatggacttggcacaggccctctgagtcgtagttggcattgtctagcaaaagtcttcaaaatacacctgccactcatctcctgagagctcatcctaaagaaaatggagggagtggccgggcgcggtggctcacacctgtaatcccagcactgtgggaggccaaggcgggttgagggagtggccaggcgcggtggctcacacctgtaatctcagcacttcgggaggccaaggtggattgagggagtggccaggcgcggtggctcacacctgtaatcccagcacttcgggaggccaaggcgggcagatcacaaggtcaggggattgagagcagcctggccaacatggcgaaaccctgtctctaccaaaagtacaaaaattagctggatgtggtggcagtgcctgtagtcccagctacttgggaggctgaggcaggagaatcgcttgaaccagggagtcggaggttgcagtgagccaagattgcaccactgcactccagcctgggcgacagagcaagactccatctcaaaaaaaaaaaaaaaaagaaaaaagaaaaaagaaaaaattaaaggaatgcaccaagtgttgtgcaaaaagatgttcctcaagtattgtttagagtagtaaaaactagggaaaacccaaacatctattggtagtgatggcaggggctgctgctatcatgctggctgcagcagggaggtgcagctggggctgcacgtttcatggagccgggggagccccgccccttctgagttggggcagagctccccaggtgtcactgcagtcacccaaactgtggctgtggatctgagcctccctgtgctcttgggggtgaggggggtggtgccaggaacgggcaggatctgtcctcctgggtgcagctgcagccaccagacccggtactgcaaatctgggcctccagctccacagagcaggcaggagctgggacaagtgggagccctgccccttctgaattggtggggtgggagcttctgggtgcagtggcaactgccctcccaggcatgggactcaagagtctctgcagcctgcacccttgggggccccaggaagggccccccatcccttcagtctcaggggtgcctgttcccactgcctggcttctcaccgctcctggctcctgctcccatctcagatcagtggttagggcagagccccggggctgtgaatggcagtaggaggcctgggcagaagggggcagtcctaaggagggcctgaaggctgggggctgggctatcagtcctgaggaccagagtggggacacgcggtgcctcttctgggctgcccatggctacccatggaccaatcagcatggacttccttccctctgaggcccataaaagctctgggctcagccagagcagggcaggggacagccagagaaggaagagggaggagagaggattggactaccagtggcagagaagagctacctgcagactacctgctggcagagaggagccacccccaccagggcctcctctctgctaagaattgcagacattaggatgaccagttgtagggaggagctaccctctccagaacctcctgtctgctgataactgaacactcaacagatgacctgcctacagagaggagctacccactgtgggtcctctgagcggttgtaacactaaatcaagctcatccttgtcttcttcacccttcacttgtctgcgtacctcattcttcctggactcaggacaagaactcaggcaaaggcatcattggcaacagaggtttccagcggggaagaaaatctacaccccaaagatcctgtagcagtaggaactgggaaaaaattatgctgcatccatacaacagaatatgctatagccactgaaaatgagggaggttttgttgttttttgaatcactggtgtctcgaagaatctgatgaaagtactggatccatttccctgaaaaaagcaagtacaaatgctaacgaatacatgtgagaagaataatgagtttggaaaattatcatctgaagattgctgttcaacttttggagagtgatattcagatgctttgaagacttccaatattcaaacatcgttgtaatgcctgattcagccaaggccgggcatggtggctcacacctgtaatcctagcactttgggaggc[134 bp omitted]ggagaatcgcttgactccgcaaggtagaggttgcagtgagccgagatcacactgctgtactccaggctgaatgacagagcaaggctccatctcgaaaaaaaaataaaaaaaaattgattcagccaagagaatcatcagtggaggccaaagcagcatgtgaaagtttgaggagaaaaaagataactacatagcatcaggctaagtgtggtggctcatgcctgtaatccaagcactttgggtagttgataccttgatcttggacttccagcctccagaactgtgaagaaatagacttctgttgttggccaggtgcagtggctcccacctgtaatcccagcactttgggaggctgaggcaggaggatggcttgagcccaggagtttaagaccagcctgggcaacacaatgagacccccatctctattaaaaaaaaagcttaaaaattagccaggcatgttggtgtgcacctgtaatcccagctattcaggaggctgaggtgagaggatcccttgtgctcagaaggccaaggctgcagtgagtctcgttggtgccactgcactccagccttggtggagtgcactcagagcatatgagctctgagcacatgaacttcaggaagcatgagagcatgggcttccttcagccaaagcgctgagactctggcatcccttctgtggttttcctgtctcacacatgtaacccagatctaatcatgaggaaacatcagatgcgcctaaatgcaaggcatattctataaaatggcctacctggattctttaaaaaatcagcattaaaaaaggcaaagactgggctgggcgtggtggctgccacctgtaatcccagcactttgggaggctgaggcaggaggatcacttgagcccaggagttctagcctgggcaacatagtgagaccccttctcttaaaaaaaacatctccttaatctctgcgtgaattgtgtgcaataataaaaaataaaaatagaaaagaaagacaaagac[136 bp omitted]cccgtctctactgaaaatagaaaaaaatcagccaggcttggtggcgggcacgtgtagtcccagctacttggaaggctgaggcaggagaatggcgtgaacccaggag[140 bp omitted]tgtcacaaactgaaagctgctctgaaagacagtagcaggacgcttgatgcaattcaaacatggacttggtcaatgctaaattcttgagtgtgataattatgctgtggatgtgtaagagagtggccttgttcttcagaatggcctctaggggtaaagggatgtgataggtgcaacttactcccaaatatctccaaaaaaaaaaaacacgatttttttcttttttttagaaggtgtctcgctctgtaacccaggctggagtgcaatggcacgatctcggctcactgcaacttccgcctcccaggttcaagcgattctcccgcctc[134 bp omitted]gcctcccaaaatgctgggattacaggggtgagccactgcacctggcttttttttttctttcttttttttgatggagttttgctcttgttgcccaggctgtggtgcaatggcacgatcttggctcactgcaacctctgcctcctgggttcaagcaagtctcctgcctcagcctaccgagtagctgggattacaggcgcctgccaccacgcccagctaattttttgtatttttagtggagacggggtttcattatgttggccaggctggtctcaaactcctgaccttaggtgatccacctgcctcagcctcccaaagtgctgggattacagacatgagccaccatgtccggcattttttttttttttttttttatgagacaggttctggctttgtggcccaggctggagtgcagtggtgtgatcttggctgactgcaacctctacctcctgggctcaagcgatcctcccgcctcagcctcctgagtagctggaactacaggtgcatgccagcatgcccagctaattttttgtgtgcatatatatatatatatattttgttgttgttgttgttgttttgttgttgttgttgttgttttggtagagatgaggtttcaccatgttgcccaggctgatgtcaaactcctgagcttaagcaatccacccatctcggcctctcaaagtgttgggattacaggtatgagccaccgtgcccagccgagatgaatatttatatggaaagaaaaccatacaatgatgtcatataatggtaacaaatggtgagttggtgaaaatgacacagaagttctttgacttattcttgtaactgttctgtacatttgaaattatttcaaaatataaagtcaagaaaagtgaaatgaaaaagcatgcacacaacatctggcatagatttgagacattcacaagcccacccttcaaatgcgggttaagaatagctgctgagaggctgcatttattggcacagtcgggttgccagttgagcgagtgttaggtgacaaaggcgaacactgaaggcagaatgctcatgtcagatcttatccttgacttgcccgccctgcacacagtgggtgtggagcagattgctcttctcttgttgaacacaaatgaatccgttggctggcatgtggcatccatgaggaatgaaaatacatacactgaagcactggagttccgattcagagtgggaagctaatcaccctctgagggagaggaatgagactccagtcgcccatctctctcacgtgtcttggcatatgcttagtgaggggaatggcaggcaaagtctgcaccatttgcatttaaatctacgctgtgggaggctgaggtgggaggatcgctcgaggtcaggagttcaagactagcctggtcagcatagccagattcccatctctacatttatatttttttaaattcttttttctttcttttctgttaattaattaattaattaatttatttatttattaggcagagtctcactctgccagccaggctggagtgcagtggcacgatcttggcgatctcagcgatcttggctcactgcaacctcctcctcctgagttcaagcgattctcctgctgcagaa[132 bp omitted]cgaaaccccgtctctagtaaaaatacaaaaattagctgggggcctggtggtgggcacctgtaatcccagctagtcaggaggctgaggatcacttggggaatcaaggctgcagtgagctgagattgcaccactgcactccagcctctgcaatagagcaacaccctgtctaaaaaacaaaacaaaacagtagagagtacacttgccgatacaaaaatccagaagtgcaaaagggcatttagaagtaaaaagccccagccatccagttcccctctccataagcaaccctgtcagccagaatgggctatgctaggctgcagtaacaagtagccccaaagccctggttgttaaagcaacaagagtttatttctcattcgtgctacatgtgcatctgcggctggtggagcccctatttggcatcatccttactctggggccctggctgatctgcctgggactcaggccagcagagcagctatgacctgaaatatgccagtgcccatggaggagggaaaagacagagcatgggagaaccacaccctgtctctcacaagcttctgcctggaaagatacttctgcccgcacttcataggccaaggcaagtcgcacgggcacagctaacttcgggggcagggaaatagaatcctaccatgtgcccaggaggagaattggaaatatttggtgcagcaaatttatatacagattctgttccccgctccttttacacaaatggtagcattcatgcacactattctatatcttgctttcttacttaacaataaaccttggagactatttcacactgggtgatgtgggcaacatccaaggcatcctcattctcttttatacagcttacttgcactattaaatttctgtttctctttctatatatacagttgggtgcagataagttaactatacttatggcataatgtccttctattattagatgaaaaaagcaggggccaggtgcgctggctgatgcctataatcccagtacttcgggaggccaaggcaggagaattacctgaagtcaggagttcgagaccagcctggtgaacgtgatgaaacctggtctctactaaaaattcaaaaattagctgggcgtggtggcgcatgcctgtagttccagctactcaggaggctgaggcacgagaattgcttgaacctgagaggcagaggtggcagt[183 bp omitted]tggtgaaaccccatctctactaaaaatacaaaaattagcaaggcatggtggtgcgcacctgtagtaccagctactagggaggctgaggcaggagaattgcttgaacctgggaggcgggggttgcagtgagccgagattgtgccactgcactcccgcctgggtgacagagcaagactccatctcaaaaaacaaaacaaaataaaaaaagaagtaaaagaaaaaagaagttacagagcagtctatatataggaaggctgatttgtaaaaaaaaaaaaattgttttcatgtggaaatttctagaagaaaacatagctaatgtaaacagcatttgactctaagcagtgagaaatcaggagatctccattttgttatctccttctctggattttctaatttttttttcccctataacaatcactgtcattgtgacagtgcacttggttgccaggaacagaagccaagagaggtttgtgggagaactgagggacttccatgggttcacttgttcctcaagaacaaggaccttgtttgtgccgttcactgtattttgttgactgaattagtgaactggcatagcagaaaataaaattcaaccgtgccccttggagtctcaaactggggatgggtagttgctgcctcatggtatttttctacctctcttttatctgtgtctctccagttctctttccagagtgatgcgcaaacaaaccctcagatgcaaggtgaaagcctgaagcttagagacaaatatttagttgcatctagggagaattttcctaaagttcgtaaaattggtacatagaggaacctcccctcctggccagagtctgcatctgagcactaaggtaaggaggcaactctcgtcagcactgtgcaaatgttttaatgcactgggtgggaaagggaagcaggcagggagaatgcttcctttttgtattttttatttttgagacaaagtcttgctctgttgcccaggctggaatgcagtggtgcgatctcagctcactgcaacctctgcctcccgggttcaagtgattctcctgcctcagcctcccgagtagctgggactacaggtgcgcaccaccacatccagctgatttttgtgtttttagtagagacatggtttcaccacattggccaggctcgtctcaaactcctgacctcaagtaatcctcccacctcagcctcccacagtgctgggattacaggcgtgagccaccacacctggctattttttacttttgagacagggtctcactctgcccaggctggagtgtagtgatgcagtgatagctcactgtagccttgaactcctgacctcaggcgatccacctgcctcggcctcccaaagtgctggaattacaggcatgagccaccacacctggcctatttttaaatttttagtagagatgaggccttgctatgttgcccaggctggtcttgaactcctggcctcaagcaatcctcatacctcagcctcccaaagtgctaggattatggttgtgggccaccatgtccagttggaaaatgcttcctaattgtcataaaaatggacacttcagtggacatcaccatgccatgcctcctcttatgggtcgaattatgtctctcaaaaaagacgtttgagtcctaactacccagtccctgtgactgtgaccttatttggagagagggtctttgcagacgagcaagttaaaatgacgttatctgggaggctcctaatctaacgtcatcagtgtcatcataaaaggggggagtttgggctgggtgtggtggctcatgcctgtaatcccagcactttgggaggccgctgagggcggatcacgaggtcaggagttcaagaccagcctgaccaatatggtgaatccctgtctctactaaaaatacaaaaattagctgggcgtggtggtgcacgcctgtagtcccagctacttgggaggctgaggcaggagactcgcttgaacccgggaggcggaggttgcagtgagctgagatcgtgccactgcactccagcctgagtgacagagagagactctgtctcaaaaaaataaaaaaaaagtgtggggcggcatttggatacagagacagacagacacagagggaagactatgtgaagacagggagaaccgcagctacaaaccaaggaatgcctaagataccaaccaagcaccaggcctgagagaggcctgagcagatcccctcttgagaaagaataaaccagccctgccacctcctttttaccttttttgttttttgaggcagagtctcactctgttgcccaggctggagtgcagtggtaggatttcggctcactgcaacctccgcttcccaagctcaagcaattctcctgcttcagcctcctggttagctggaattacaggtgcctgccaccacatccggctaattttttttttttgtatttttagtcgagacagcgtttcaacatgttggccaggctgatctcaaactcttgacctcaggtgatcctcctgccttggcctcccaaagtgctgggattataggcatgagcccctgcacctggccggcctgccacctccttgatcttggacttccagcctccggaactgtgagccatgaagttttgcaaaactagtacaccccacccacacccctacgctttaatgctattcggccaaataatttgaatataaggaggtgacctctagaatctacaaacaaatgctcacatgctcagaggacagagggctttgttaggacaaaacccagaacttagaagcaccttacagtgcacccccacatccatcccctgacccctcagctaggtggtgggccctggcctgggaacaaatgcttcaagcccaacctttggcaaattgcccacctactacacccagctacacgtttgaggccagggggcctcccctgtgacccataaacgtgggtggaaatccatcctttctccacagtaagccttgagaccttcgatcaggaaaatgtctatttattccaaaaaataccaagtcgcagctcctctggctgtcctcaccagggaattaattaggggaaggggccagtgttggagagggggtggagagaggaagtgatgaggagggaggcagaagctgttggagggtcttcaggtgtggaactatttatcttctccctgtgaagtgccccctcccatgctcccccaaccagacggggagatgcctgtgtgtgtgtgcttgtgtatgcatgggtttgtgtgcatttgcatttgttggggcatggggaagtctcagatgacgaggtcccagctcaagacatgtggaggggaattgtcagtacacacctgctcccacccctcaagacctctctcctctatggcttatttgagatcaaatcaaggccccagggtcaggcagcctgtgccaactgaatagggacagggctaggggtgggatccctggaatccaggctgggctagagctagtggaggggggataaaaaagctgaaaggcccagacccccaaatcccggcagctggagaaagctgagtgttccgcggaggtgttgagcagaggggagggggctgggagggggtgggtgctcaagctggctcctttctggggaagtcacagttggcctgagcagtgcggggctggggaggccctggaagggatgggaggagcccctcagagcagctagaagccgtggggttgaaaaactggcaccagggcccaggtggatttgggtaacccccatttcctcagtgtggtgggaaccaagggccagttgtctgccccaagctcctgacaagaaggagtgtgaggtgccagtgtttgcggggagacataagagggagggggacggcccaggggaggaagaagaggccccccccacctcgccctaggggctgggggaggggcgtgtagccctttaagagtgggggaatggccgcccccgcaacatggctatgtacaaagagaattgagggaagattgtgcattgggtgctggggacttcctgccacccccggaggctccccgggtgttaaggtgttagggagggaggtgaaggagcacccctggtcccgcagatgtgctggcagggaccattgctctccagtgtccctgctgcaggatgaggccagcagaagacagcactgaaggccccagtcggtcaccagctttgacctatcccgcgggggtcagggatctctgaggagaatttggccggggccagtggagtgctgatcctggtaggggcccaagtgacagggattgggcagggggcagtggcgtcacctgagggttgaaatgcttcctctctggtgataatgagaggttgctgggttgaccctgtcaccaatcagatggctgggtgagggacagcgctgctgtcaggaggggcctgggtgcctcaccggggggtaaggtgaggttggctgaggccacatctgtggtgggattgatgcaggcatcatcctcggtcaggagtgaggcagtgacataaggagggccagagtaggggtgaagtcttcagagggggacagctggccccacccctgtccttttagtggaaacgggaatatggcctgttgtgctggttccccttaagtgaacaactgtaagtaccatgcggccccagaggacaactgaaatacagcccgtcacggtacttggctcctaagatgatggctcttgggggatgatggcacatggttgcagtggactctgggatgacaccagggttatggtggatcctagtgggtggtgacagcactggacctcatggatcctgggagatgataacaccagggtcatggtggatcctaatagatggtgacaacactggacctcatggatcctgggagatgataacaccagggtcatggtggatcctagtagatggtgacaacactggacctcatggatcctgggagatgatgacaccagggttatggtggatcctagtggatggtgacagcactggacctcatggatcacggatgatgacaccagggttatggcggatcctagtggatggtgacagcactggacctcatggatcctgggagaagatgacaccagggttatggtggatactagtggatggtgacagacagcactggacctcatggatcctgggagatgatgacaccagggttatggtggatcctagtggatggtgacagcactggacctcatggatcacaggagatgatgacaccagggtcatggtggatcctagtggatggtgacagcactggacctcatggatcacaggagatgatgacaccagggttatggtggatcctagtggatggtgacagcattggctctcgtggatcctggcaggtgataacaccatagttgaagtggatactgggaggtagtggcacatgtttgaatgaaatcctgggaggtggtggcacatggttgaagtggatccctggagatgatgacaccatgcatccctgcaaatgatgatgacactattgggcatcatgggtcttgggaggtgatgacaccaaaatcatgagggattatgggaaatggtggaatcatcagtcctagtggatttcagtagaggatgtctctgtcaggtgtagtggattctggaaggtaatgtcatcactggtcatggtggaatctaggagatgatgacaccgtcagctgtggtggctcctgaaagatgatgacaccatggttgtgaggaatcatggaggatggtgacaccattggctatggggagtcttggcagatggtgacaccattagtcatggtaaatcctggaagaagatgataccatagttgtgggtcataggtaatcctggggaaggattccatcctcagacatgggtaacacttgaccccgggtgtggtgccatcatgagtggcgggtgttgtgtgatgctgacagtgtcagtgagggcaagagtaggtgtaccccaagcacctccccccagtagaaggctaggactttgttgacagaggtgattgtctctagatatggcagaaagaaaagtgaggccaggctatgggacacctatgagtgccagaactccaggatcctggtgatccagagtggcctcctgggagcagaaggccatctggaggtcctgtctcccaggagtcatggcacagatgtgggatccaaggccccatttcccctcagagggtctggcagagatcctgctggacatgtccctggagtctggggagggagcaaccaagctaagtcatggtgggacaaggcagtaactctggtgacaccaccaataccgatggccttccagagtgggcagtgcctctgaggaggaagctctggtgatgccatcacagcattgggggtaggggtgtcactgccaacagcctacacagaccatcatctctggaggaggccctccacatgggcggctccccagcgatgcttccttcagacaacatctcaggacagggcccctctctgctctctggcatcttccctggggtggtcctggactctgggcctgccctgccttctacaacatggtggcagcagtggaggcatctctttgtgccatctcagagcacatagcatctgggcgacatcacagaagggacctcctcctggagaggtcccagagtgggtggtcatctctggtgatgacatcacaggaagaggcacggtccctctgatgacgtcatagggcaaggcaccttctctggtgatggcatcacaggaaggaggcagggtccctgtgatgatgttgtgaaaaggggaccttatgtctagtgaggacacaatcggtgaggcattttcccctgcgacgtgtcccaggaagatggctttgtctgtaatgatgacatcataggacagaggcatcttctctgctgcaaagacacagggagaaaatatcttccccatggcgatgatgccaaaagaggccttggagttagagatgacatcatccaggtgagattgtctctgcagtgacaccacaggaaggaatgtcatggaacaaggcgtcgtctctgttattataccacaagaaggaagcctctgaggacaccatagaacatggacatggcctccagcgctgacctcacgggccggcctcttcctctgtgatgacctcatgggaacgaggctttgtccctgtgatgacatcacagaacacagacatttttgctagtgatgacctcatgagccggcctcttcctctgggatgacatcatgggaaggaggccttggctcaagcagtgaagtaataggaggaggaatcttgtctgccaggacatcccagaaggaggctttcactcctgtccaagggccgatctgggccccaggcccctggcatgtgtgcgcctgtgtcgggggatccaggctgggacggggggcccgggaggccgcagccccccagacccggccctggcctcagacagtcacctcgttcttgctggccgtgcgcaggtgctggggcaggtggtggcccgggatgaactgcagctgctccagcgtgccctggcgctggaagggcggcctgcgggccagtgtgcccccgcccccgccggcgtcggacatccaggccggctgcggcgagccgtgcagggcgtggtggtggtgggcgtgcaggctggacggtggcggcagcccgcgcagcggtgttgggggccccccgggccccagcagcaggttggagtgcgaggcggccaggctggcccgggcggtggggtcggggggcagcgcggggctgcgcgggggcgacagcaggtgctcgcgactctggcgcagggcctcgggcgaggacagcagcaggtgctcctgcgacaccaggcgcgcgcgcggcagcgtgaactcgtagcgcgaacggccaccatcgcccagcaggtgctcctgggacatgacccgccgggggttgggcgcgggcgccaggcccagctcctctgggccgccccaggcctccatgcgatagccgccccccgtgcccggccgccgcagcgcgtgcaggggcagcgtgccgcggggcaattccaggggccggcgcttcaggtaggcctcgtccagatccttctcggctgcggggagagggggaaaagccacagccgtgggtcccctgcgcatctagagccctccccctcccacctcgtcacatcccgctcctatgctccttgtgcccccacaaggatcctgggcatcaggctagctgtgaggccaaaatgcagattcccaggcccagcccacaatgctgggtcagtagatgtggaggacttcctcttcttcccccccgcgccgcctatcccttcttttgggagtagaacccaactcttgcttttggggaaccactgaccccctctcatcctgtagcaatgtgattcacacttggagttgtgacctgttaggttgtgaagttgattttgcgggtagtgagcagcattttgaaaaatgaaatcaaatagaacagaagagaaaactatcagaaagtgtttatgtaataagggaatcaggggtaagtgttggttcataaaattcttactgcagacgcgtgtgtgtgtgtgtggtgggtgtgtggtgtatatgtggtgtgtgtgtggtgtgtgtgtgtggtgtgtggtgtgtgtgcgtgtgtggtgtatatgtggtgtgtgtgtgtggtgtgtatgtgggtgtgtggtttgtgtgtggtgtgtgtggtgtgtgtgtatggtgtgtgtgtggtgtgtgtgtgtgggtgtgtggttgtgtggtgtgtgtgtatggtgtgtgtgtggtgtatatgtggtgtgtatgtggtgtgtgtgtggttgtgtggtgtgtgtgtggttgtgtgtgtatggtgtgtgtggtgtgtgtgtatggtgtgtgtgtggtgtgtgtgtggtgtgggtgtgtggtatggcgtgtgtgtgtggtgtgtgtggttgtgtgtatggtgtgtgtggtgtgtgtgtatggtgtgtggtgtgtgtgtatggtgcgtgtgtgtggtgtgggtgtgtggttgtgtggtgtgtgtggtgtatatgtggtgtgtgtggtgtgtgtggtgtgtggtgtgtgtatggtgtgtgtggtgtgtgtgtgcgtgtgtgcatggtgtgtatgtgtgtgtggtgtgtggtgtgtgtgtgcgtgtgtgtatatgtggtgtgtgtggtgtgtgtgtatatgtggtgtgtgtggtgtgtgtgtatatgtggtgtgtgtgtatatgtggtgtgtgtatggtgtgtggtgtgtgggtgtgtgtggtgtgtgtggatggtgtgtatggtgtgtgtgtggtgtatatgtggtgtgtgtgtgggtgtgtggctgtgtggtgtgtgtgtggtgtgtgtgtagtgtgtatggtgtgtgtggtgtgtgtggtgtgtgtgtatggtgtgtgtgtggtgtgtgtggtgtgtgtggtgtatgtgtatggtgtgtgtgtgtggtgtgtgtgtatggtgtgtgtggttgtgtggtgtgtatgtgtgtgtggtgtgtgtatggtgtgtgtgtatgtgtgtgtgcgtgtgtgcgtgtgtgtggtgtgtatgtgtgtgcgtgtgtgcgtgtgtgtatatgtggtgtgtgtgtatatgtggtgtgtgtgtgggtgtgtgtggtgtgtgtgtatggtgtgtatggtgtgtgtgtggtgtgtgtgtggtgtatatgtggtgtgtgtgtgtgggtgtgtgttgtgtgtgtgtgtgtgtgattgaaatattaaaggatgagatttagtttaaaagaatccatcaaggtcagatgaggtggctcactcctgtaatcccagcactttgggtgattgaacaggagggtcccttgagcccaggagttcaagaccgacctgggcaatatagtgagactccatctctacaaaaaaaaaaaaaaaaaaaaaaaaattagctaagcatggtggctcatgcttatagtcccagttactcgggaggctgacgtcggaggattgcttgagtccagaaagttgagcctgcagtgagccatgattacaccactgcactccagcctgggcaaaagagtgagaccttgtctcgttaaaaaaaaaaaaaaggatccaccaaaaagtggggtggagggaggatagattaacaaaatgtggctaattattaaggctgagtgatgggaacatgggactcattttataattttctctactcgcatgtatgtttgcaaatgtccgtaataaaaagtttcaaagatttcctgtaattaaaaatatacacatgtgtgtgtgtgtgtgtgtct[132 bp omitted]gaaaccccgtctctattaaaaatacaaaaattagccaggagtggtggcatgtgcctgtaatcccagctactctggagactgaggcaggagaatcgcttgagcccaggaggcagaggttgcagtgagccgagatggtgccattgcactccagcctgggcaacaacagtgaaactctgtctcaaaaaaacaaaaaacaaaatgaaacaaaacaaaaaacgccgggcatagtggctcacgccttaatcccagcactttgggaggc[134 bp omitted]aaggcaggagaatcacttgaactcggcaggcggagattgcagtgagccaagatcatgccactgctctccagcctgagcgacaagagtgagactctgtctcaaaaaaaaaaaaaaaaagtttctggctgggtatggtgggtcactcctgtaatctcagcactttgagaggacgaggtgggtggctttcttgagcccaggagtttgaggccagcctgggcaacacagtgaaaccccgtctctacaaaaaatacaaaaattagccaggcatggcagcacgagctcttagttccagctagccaggaggctgacgtgggaggatcatgcttgagcctggggaggtagaggctgcagtgaatgatgatcatgccactacatcccagcctgggtgacagagtgagaccctgtcttgaaaacatagtggtaataaagaagaaaaagtgtttcctagtgaagctctcagtttaagatgtttgaaggctgctccactgtcagcaatgggccacggactgcagaatgtccaatgagagtcacaggaatgggttcagggatgggcatgtgacccagcttgcaccaatggcatccaggcctgggattttttgccggaattgttgggagagactcttttctgccagggtccctgagctggtagaacggcagcctgaacatctgcagggtggtcgttgccaccacgaggggagactctctgaaaatgaggcccgccggtggcgtagagagctaagagacagctcttgagcccccaaaacagccacatcgcaatctggtgacctgtagattttccatgatcaagtcaacatgtttttttcctttagctgaagtagtatttctattaattgcaagtccaagtcctgatgaacaccataatatgtcctgggaggggagaccagaaggttgcattaaaaaaaaatcagaagtgattctgatacaaaagtaccacaggtaattccagaacgaacttggagtaaaacctgggagagaagctaaaccattggaaggctcttgggccactgtccacggtcctgaacccaggctctggccccgccccctccccttcaccgccgcgctgcccttgccaggactcacccagcctcttgagggaagagtagcggttcagctcggatttcacggcagcctcgtaggacgggggcagatgcgagaggttgtggaaggaccgagagcaggacagcgtggagtagtgcaaggaggggctgggcggcggcaaggctcgccagtctgggttagagggggcagggccagggtcagtcagcttcctccctcagacccaggagtccaggcccccagcccctgctccatcagacccaggagtccagaaacccagcccctcttccttcagacccaggagtgcaggcccccagcccctccacctcagacccaggaattcaggcctcagccccgcctccctcagacccaggagtccaggcccccagcccctcctccctcagacccaggcgtccaggcctgcagcccctcctccctcagacccaggcgtccaggcccccagcccctcctccctcagacccaggcgtccaggcccccagcccctcctccctcagacccaggatccaggctcagccctcctccctcagacccaggcgtccaggcccccagcccctcctccctcagacccagcagttctttggggagttagaaatctgagattgtagcccatcagttccagcagttcaggctccctcttctcaccccagcccctctgctcaggagacgggcttgatgctggggaagagggccccaagaggggggtactgggcatttgtcagcacccactgagtgcctggccccaggctccatcaacaatgtgggagagagatgaccacttttggcatccacacgaggaaacaggctcacttggtgacctggccagaccatgagcgccatgaggactgggctcacaggggtctcactcctgctctatactgggcacctggcatggctggcccaacacaaagggggaagggaaggaggcctgctcttttccgcagccgggccctcttccgcacccagtgtggcggcgtggtgcttggggctgttgacgttgaggtgcaggtagctgtggtgcagattatctggggggaccgagaagggagatgatgtcactgccatcactgactcccagctggcaccgtggccctgatctctgggaaggactctggccccaaggtcggccccacatgcaggacctcgttagagctccacagatcaacccatgccattggccacatgggggaaactgaggctgggggtcttgaaggtggaaagtgtgggcacaggctcagggctgggtaagtggtctgtcccaagttcttagcacccccccccctggtgcccaggctagagatctgagggggtcgccttgctacctccctccacctcccactcatgtccacttggttccttctgacatctgaatctctgccctgatgtgtcctctccctcctggatcaccaaagcagcctctggccatccagcccatccatctccatgatcagcctcaccgaggtaactgcccttccactgctcaacagccttcccattggctcaccatcacccacgggacaaagttgaacccaggaatggtgtttgaggcttcaaaacctggacccactggatgtctgcagccccatctcccatcccttccctcaagccgcactgctctctccagtgagcccagcgtggtcctgccacagggcctttgcacatgccaccatgctgttctcactgccttgaagcccttcttcccatctgcctcaagatccagctcagatgtctcttctcctctccacccctgatcccagctccgtccttgtcctcttgctgcctggaccatcatcccagcctcctcctgggcctctttcctctcatctctgccctttgcatgggttccagaggaccggttctaccacccactgctggctgtgttgctcctctgctggaactcctccgcagctctccatcaccctcaggacggaggcggagttcctcagcccagcctggcgctcaaggccctctctgaggtcaccaaccaccctctccctggcctcaagtctggtcacctcacaagctctgccacctggagcttcccagccccagtaactcctctcctcctccaggcctttgctcaaatacctctccctcggagaagcccttctgacgcctctcctcctccaggcctttgctcaaatacctctccctcggagaagcccttctaatgcctctcctcctccaggcctttgctcaaatacctctcccttggagaagcccttctaacgcctctcctcctccaggcctttgctcaaatacctccccctcggagaagcccttctgcccccaaaccagaccacatcttctcagttcccctgacagctccttggacctctccactgatgcattcatcataaattataataatatagatcatatttaaatgatatacaatattaaatatgatatatcatattttaaatatataattatatatatttaacaatagcaacagcccacacttacatagtatttttttctgtgttacacattattctaatcacctgcctcaccaattcatttgctcttcaccataaccccatgaagtgagtattgttatgtttcttattttatggatggagaaactgaggcccacagaggtgaggtcacttgccccaggtcacacaatggcagagtcaggattcaaacccagtcggtctggctcctgacaaattcgaatttggtagttgtgcccttgtgtgtagttggctgttaggtggtctgacaccgagcgcaggggcttgagaatgtctaaacctacatcaccaaggtgcccatggagccccacccaggggggtccacaggagggcaaggagagggtctggctctctacggagttcctagcccccgtccgcctttcgcagggcaggacccggcagtgcaaggcgggcgtagggggtgagggcgggtcctgggcgatgggggtggagccgccatggagggcggggctacatgatgaaggggcgtggccagagacggaggctgcgccggatcccacgttccactcaccgaggttgggggtcttcacggtgttgtagaggttcttgggcgtcctggggggcatgctgtcgggaccgccgatccccggggtcagggagctgcttcgggcccggtccgggcgggtcccaggccccgcctgatgtctcagaatgtccaccagagctctaaaggtggcagagaggtggtcaaaggcctgggggctgagggtggcaggggtaccaggaaggcttctttccgctccctgctctcgcccttgggtaatctgtcactcagcctgcctttttcgccattggccacgcccctttctcgttggccacgccccctagaatgaccccctttctcaggccacacttcctgcttgaagcgctgctgccttaactcgtgtggaagccatcgcttctgtggtccctctcacttccctgtgggctcgccccaccctgaatctgggaccccattcccgttccttttgcagccttccccatggcaacaaagggtgctccatttacccagtgatgcggacctcaaacattaaatcaccttgactcttctttcccccaccttcatacctttcagcaatcctacggatcgaacctccaaaacatatcccaaatcagaccactactcaccacctctgcaatctctcacctggatcattgcaacagccccctcacgggtctccccactcccaccctagccccgtacactccagtctcacgcgcagcccgcataatttaaaaaatggacagatggcatcacgcccgagctcaggaccctgcagtggccccatcacacttaggataaacccgggcccgcctacttctcctcacctcctgctgcccaccgccgccagctgcacgggcgcttccctgccctgcaggccaccgagggcctttgcacgcggttcccctgcccaaaacctctcgcccacagatctctgcgtggttcgctccctcccttcgggtctccgttcagaggccttttcggatcacttcctctaatccagcgccctctctctcaacactttccgctgattttcttcacagcagtcatctaaaattacactgcacatgcttacggactgggccactgatagttaatgagcccttaccgtgtgccaggaccctgcacgaatcaactcagttaattacaatccgaataggtggggacgatgattagtctcattgtgcggacaggaaactgaggaacagagacgttaagcaactcatccactgtcacatagcctgtaggctgtgaacttggatttggaagtcaggcttttccaccagggcagagaccttgttttgttcactggtgtatccccagctcctggcccacagaaggtgctcaagaaatatgtgtcgaatgaatgagagtctgggcttctccctctccctgcatcactccgcaacagccgggccggctctggcgcgactttctcagcccctgcccaccttcagctacgccggcggccgccacctgggtctctgaccaccacgccctatccctgcagcccctcctcctcggatggctccacctcccttgctgggccccgccccaggctcgcagtcctcccgcccgagagcacacgcacctgggcacgttgatatcccggtgcgcccggggcgcacgggacgccttgctgaaggccactttggcgccgacgcccacggccagggcgaagctgatgaccccgcacacgacgtaggctgtgctgcccccggggccctcgcccccgcggcccccggcacccccagtccggcccccttccaaccacccggcctggccgggccctggccccccgcccgcacccccagcgcccccggcgcccccagctagcggcggcggcgtggtggcccagcgcggcgtgtcgtagttggagcaggaggcctgcgccaggcgcatgtgacggtgctcacagcagaagcggtagtggcaggtgccacagcagaagcggtaggagccggtgctgcagttgaaggtggcgtcgtactggcccatgacatcgtagtagccgtggcagagctcggcgggagggggcgcccgggccgccgcgcccgccccgcccgcggggccggtcctggtgccgttggcgcctgggctcgccgcgcccccgccgcccgtcagcgccccggtcaggcgccgcaggtgcgccagcagggcgggcagcgggcccgcgggctcggcgctcgtggcgttggacgggcgcgccctggcctggccggcgctagaggccaggagtacgaggagcaggagggccggcatggggcttgcagggggtcgcactgggccgccaggctgcggggagaacgagagcagaggttggagcgctgggcgggagagaaacggtcagagggtgagaaacgtagagatgggtgggcagagaggctggggagggcgggcggggggcggcagagtgtggggagcaacaggcgccaggaggcaggaagggcggagggagctgagctgcgtgggcccaagttggccgccccacgcgcggtgggcgacgatgggagagtaatggaaacgcgcccgggcacggctgggggagagaaatgagcatgggcggacagaaccgggatcaggcgagagatgaatgcgggagaagcgattgggagggtcgacagacaccagaggggtgtgcagacattaggacgaggagcgaggcgaggcgcgatgtaaggagaagaaacgggggcggcgaagaggagagggcaggggaggcagctggagggaggcgcgcgaaggggaggggagggtggcgaggggagtggggaccgcggagggagggaaggaagcgagacagatgaggggtgggtgggaaaggaggagtcagggagacggggaaggagggagaaaagaaggggaggaggaggagggggaggagagggagggaggaggagagagagaagttgagaatttgagtttatagaccaggcaagtgggaagaggcagtgcacggtttttcaacactgacattcggggaccgatgctgctttgtggtgagcgcctgtcctgagcgctgtaggatgtttagcagcgccctctccatgccagcagcaccacattcccccgagttgtgacaatgtaagatgtttccaggcattgccaaatgttcccctggtgggaggaggccacagctgcccccgtggagaaccactgacttacacccctatggtcctcagtgccccgaaatgccaatttctctcccttagttagatctgataatcaagggatcttaggtgccctccctccctccctctctctccctctctctctctctctccctggcatgcacacgcacacacacaccactgttacggcgtcgggtttgaagggtctctgtccacagctgaaccacaaccacagcagggtggttcccctgccgactggacctcctgccagctgcctgacactgacaggctcttatctaagctccctgtgccccaagtcccccatctgtaaaatggggataaggatggttatctctgagtggtcaggaggatgaactgagggaatatgtgtaaagagcttagaacagtgcctggcatattgcaggtgaaatatgaaagtgtttgctgctgctgctatttcagaagggagatacaggctgagaaagggtcgtccgggtgcggcggctcacgcctgtaaatcccagcactctgggaggccaaggtgggcaaattgctcaagcaggagaccagccagcctcgccaacacagcaaaaccgtgtctttacaaaaaaaaaaaaaaaaaaaattagcccggcgtggtcgtgcgcacctatagtcccaggtactcaggacgctgaggtgggaggataacttgagtcccagagatcaaggctgctgggagctgtgatttcaccaccgcactccagcctgagttgacagagtgagaccctgtctcaaaagagagagaaaaggtgatgcagaagagaggtgggagttggtggtggtggtggtgggcacgtcttccagctgtttctatggcaacagtccagccaagtcccagacacgcccacccccgtggacctagagggatgatagaggtgggaaggatgcctggcctcgggttccgggagaaggaaacgtctgagctctacctgcaggaggaaccccccaggggtctggggtgactgcccacggagtcttacatttcctctctgcaagaacctgatctgaacagcccctgccctgagctagctgccgagaggctgccatagagcttcccaggagcaggcatgatgcgcggggtgtgcattcgttctgcaaatcttcattcaataaatgtctcctgagcagcctccctgggctgaggatgcagcagtgagtaagcccacagggttcctgcctttacgggggtttacgtgctagtgaggggggacagtcagcagatggacacaaatgaatgggacacatgttgacgccaattgtgaagaaataaaaaggaatgatgaaggaagccgtgaagaaatgaaagcagcataaagggatggagggggtggatgggattgagtcaataaatatcactcggtgttattttctattatatgccaccatccatcgtgtgtgtgtctagggaccacaccactgtcaacaacattgctgctggtggggatgggcagagggttggaaggtgaaccttccagagcctcagtgagctccatcgccctcctgcttggggcctcacctttccttttcagctccagcttggacccctcccctgactcggtgctagaataccccactgcccactggacacttcctcctgggtgtttaatgggagtcttagaagtggcttgaccccacactgt[132 bp omitted]acttgcaagaccagcttggccaatatgacgaaaccccgtctctactaaaaatacaaaaataactagccgggcatggtggcgtgcgcctgtagtcccagctactcaggaggctgaagcaggagaatcgcttgaactccggaagtggaggttgcagtgagccgagattatgtcattgcactcactgtactccagcctgggcaacagagtgagactccgtctcaaaaaaaaaaaaaaaag[147 bp omitted]gtggcgggcgcctgtagtcccagctactcgggaggctgaggcagaagaatggcgtgaaccccggaggtggagcttgcagtgagcagagatcgtgccactgcactccagcctgggctgacagagtgagacgtcgtctcaaaaaaaaaaaaaaaaaaaagaagttaactaggattaccatgcacttccactctgcagtgtctaccccaaagaattcaaaacatgtgtccacacaaaaccttatccttgaatgttcataacagcaccttgcacaacagccaaatactgcaaacaatgcaatcacccattatggaggaacggacaaaccaacgacggcctacccatgccacagaatattactcaaccgtgacaggtaccaagggctgagatacaagccacagcatgcacgaaccttgaagacatgacgttcagtggaaaagtccagccataaatctcatgtagtgtatgatttcattaatatgaaatatcacaatagtcaaatccacagagactgaaagccgattaataattgcccggagctggggacaggaggatggggggtgaccgctaaagggtggccaggcttccttgtgtggtgaggaaaataccctggaactaaatagtggtgatggctccacaacctgatggatacgctaatgccaccgaatcaaacactttgagaatggtt[139 bp omitted]gaaacactgtcactactaaaagtacaaaaatgagcccggcgcagtggcgggcgcctttaattccagctactcgggaagctgaggaaggagaatcgcttgaaccccggaggctcaggttgcagtgagctgagatcacaccactgcactccagccagggtgacagcgtgagactccatctcaaaaaaaaaaaaaaaaaaaaaaaaaaggaaacacgtcaaatggcatcaaccactcccctgtccgcattctggttccctgtcacacctggaataaaaccccaactctgccagtagctcctcttctcatcctttccttttcccttcataccttccaagttcatgctcaagacgctccaccttcctgcctgtgcacgtgctgtttccttcgtctgggagccccttcctttccacagatcctgctctgacctgcctcctttctcccttccttcagggtgtccctagcatgtcatttcagccagccttcctgtcctagcggtaacagcagccccagacatgctcccaattcctcacttgctttgcaactttcatagctgtcatctctgctggccacatgtgtgtgtactgacacactcatttcagatgaggacgctgaggttccgagaggtcacatcatttgcctgagacccaaggtgcccaaagagtggggctgggctttgaactcaggtctctgagcactgtgacctgtacagcatggatgcctttttcccccacacagagacacatcccttccagaagtggcacatgcatgcagcactgcagattccttcattcattgagggctaccatgtagggttgggcaggtcgtgcactgcacaagggggtctggctgagaggctgaaatcctgctgggctctgcttcccagggcgtgtgccagtggggctgcatccatttggggtaaggagtgccccttccaagctcacacaagggtgccatctgcgtgccaaaccacagacctgggagagcggattgggcaaggtggggggtgcctttgtctcatctgcacagaggctgctgtatgggctggcagttctgctcactccgcattccgtgccaagcctccgccaggctccatggacacgatttctccctctgctgacagagtcccactggctgctccaactgcacgcacgtggtgcacacacccaaggagacacagctctaggccattgacaactccagcagggggacagggagggagagcaggagcagtggcgcacctcccctcaaactcagcgatacacgcagacgcaccacacacagaccacacatacacacacacacacaccacacacaccacacatacacatacaccacacactgaccctccacaccacacacgccgcacagaccacacatacacacacacaccacacacacaccacacacaccacacatacacacacacaccacacactgaccctccacaccacacacacgccacacagaccacacattacacacacacgccacacacacacaccacacactgacccccccacaccacacacacgccacacaggccacacatacacacacacaccacccacagaccacacaaacacacacaccacacatacacacaccacacacacacacaccacacacaccacacatacacatacaccacacactgaccctccacaccacacacgccgcagagaccacacatacacacacacaccacacacacacaccacacactgaccctccacaccacacacacgccacacagaccacacatacacacacacgccacacacacacaccacacactgacccccccacaacacacacacgccacacagaccacacatacacacacacaccacacacacacaccacacacaccacacatacacatacaccacacactgaccctccacaccacacacgccgcacagacaacacatacacacacaccacacacacacaccacacacacaccacacatacacacacaccacacactgaccctccacaccacacacacgccacacagaccacacatacacacacacaccacacacacaccacacatacacacacacaccacacacacacaccacacactgacacacgcacacaggccacacatacacacaccacacacacacacacaccacacaccacacacacacaccacacactgaccctccacaccacacacacgccacacagaccacacacacacacacacacaccacacactgacccccccacaccacacacatgccacacaggccacacatacacacacacacaccacacacaggccacacaaacacacaccacacacacacacacacacaccacactgaccccccacaccacacacacgccacacagaccacacacacacaccacacgcacacacaccacacacagcttctctacccctcctggtcagggcagcacctataggtgggtggagagaggacgtgcacctgcagacacagcggccccatccagacactggatgaattcttccctgacctcacacaaagctgcgcagagacactgccgaacacgctgacacagagcacagggcacccagatagtcccagacacaacacgaaaggacctggtggcactcctgtggcctcctcccggcacacggacgcacatacacaccactccacgtggacacacaacacaaacatgggcttctgcacatttcaacccctacacactgggaccacttacagctctgggacaggaccagggacctgccccacctggctccacgtgggcccgcgaccacacacatcacagctcacagccacgcaacctcaggggcgcacacacgtgtgcaaatacaccctcaccagcaatggagagtgtggaaggcgccatgtgacacctccgccccacacccgcccccacctcggctctcacgcacacaacggcgctctcctcctccacagctgagggggaaggggcccgggaccccaggcttcacgtctgcatcttgcatgccccgctgaaccccagctcaggacctgacagacacagatgtggggacacaggtcagagagccagcctgggcagggtccctgggcttctgggagctcctcccccaccccccaccagccccctgcccagctctgtgctgcacactccacctgctgcgtcccctcccaaccctcttggctgggggctgggggccaggatcccagaagctcagagaaagggacagggatactgaaggggaaacagaggtcctgggagaggggacagagagccaaaggcagggcagattgtgtgtgtttgagagagaagggggtacagagacccagagagagggggacagagacccagatagagggacagggacccagagagatgggggacagagacccagagagagggggacagagacccagagacggggacagagacccagagagaggggacagagactcagagagacagggggacagggacccagagagatgggggacagagacccagagagagggggacagagacccagagacggggacagagacccagagagaggggacagagactcagagagacagggggacagggacccagagagatgggggacagagacccagagagagggggacagagacccagagacggggacagagacccagagagaggggacagagactcagagagacagggggacagggacccagagagatgggggacagagacccagagagagggggacagagacccagagacggggacagagacccagaaagacaggggacagagacccagagagagaggggacagagacccagagagagagggggacagagacccagagagagagggggacagagacccagagagagaaggggacagagacccagagacagggggacagagacccagaaagacagggggacagagactcagagagagagggaacagagacccagagagagagggtacagagacccagagagagagggggacagagacccagagagagagggggacagagacccagagacagggggacaaagacccagagagagagagggacacagacccagagacagggggacacagacccagagacagggggacagagacccagagagagaggggggacagagacccagagaggggacagagacccagagacaaggggacagagacccagagacagggggacagagacccagagagagaggggggacagagacccagagaggggacagagacccagagagagacgcaaaagagacgggcggggggcgggagacaaatgctcagaggggacgcagcgtcctagagaagtggggttcagagaccctgagaggagagagagccagagaggggaggacctgacctaccgaggggacagacgcccgagagagtcggcgcctctggggtctcgggagctgggctggagtggggtccgcagggggtgggtggggggctgaggggcgcagtgggtatggagagagaggccagggctgggccgggcgggcgccggtccgagtgcgaacggtggagctcctctggggttgacgggtcggtttggggtaggggtgtgcgttcaagaggaggcgggcccgggcgggtggggaaagcccagagggaaggggcgggctcttgctggagggcgcggggaccccagttccgggcgccaggggcggcggggcggggagaccctgggggctgcacgggggcgccgtgcctcgcgggccgcggggaaggcagggaccgagcgagggaggaggaccctcccccgacccgcagcccaggcggcggccggtcccggcgcccccgcccagatccctgcgccgcccggcccgcgtgcttgtctctgggtctctgcatcttcgcgtcccggggcgccccgtccacgcctcctcccggacccccgcctcccccgcccgtctctgtctctagcgggggtctcagccctcgtctgtcgctgcgggtctcctcgcatctcggcgtctctctccgcgtctctctccgtcccggcgcctgtgtcccgggctgtccccagctccgagcctcagttccctgcgcgcctccatttccctccttcccccgcccggtctccgtcacccctctgtctccacatcccgcttgtctctccttcctggctccacgtctctttctctgtcccaggtttgctgtcgtctgatctctgtctgagtgtctgtgtctccactcgcccccgacccggccccccgagccccctcccgggtcccccactcccattcaggcccgggttggtggggtgggggggcgctgcggcgggagctgtgtgttcccagcgcaaaatagactctcgttgccatggcgacgcgcgcggggcctcggagacgcgaggcttcgggcttggggggtgaggaggggggacacctggatccggaaggcgggggccgggggcgccgccgcccggtcccaggggctcctcctagatccctggggagagggatgctgggcgctccgacgctgggggccaggggaccggaccttctgggaggggtctgggctcccagggtcggcggtgggggctccgattgcccaacgcggggcgggctgactgacagctctgacgccggtgtctctgaggactcaggggtggcctctcaggtctccaaggttggggaagaggcaagggctgcaaatctggaacggaggagctctccctgggggtctgcagattccaactcctagatctgcagaattctgggagcccccatgtgggtcccggaactcctgcgtctgggggagccgggactacaatgctttcagcccttccttccatccgtccatccatccttccatccatccatccacccatccacatggctgtgtcttccttcctcccgtctccatgtccccttgcctcagtttcccttccgcacctgggtgcggtctcgctcacctcgctttccggatgcgggacccttggggagccgggggtggcggcgtggggggcggccggaggcggcggcggagcgcgtgtctgccggcagctgggctgggcgtgcgcgcgccggctgggggcgaccccggccgcagttctcctccgagcagatgcgccgcgtccgtgcagatgtgtcagccgccagccctcgcctttgcctcgcgccgagaagaggcacctccccccccccacctgctggggaccccgctttctccctcctgcagcccccagtcgcccccgggatcccccccaacccaagaatggtttggtccacagccacatatatgtttattctgcgagtccgtgtcccacagtctgagactcttcttcccctccccttcccgccccgtgaagtggcccggggccgagccccgcctccatcttggctcagccaattcccacccagtttccaggagtctcatttgcatttccgggagcagctgtccaatgggaaggcagcaccctgccccccccacaagggggcggcactcctggtggatcgcaccactcttgggatccagggatggggggaacgggcttccactgaggtccgggtgacaggagggtggtcttccctcaaggcagggttggagttcagtggaggagggagttctggccttggaagaggcccagcagtccgctgtctggggcgggctccttgatgagtttctggatctgtaagggcagggggcgatgggtcaggaagcgtctagggtcccgatctccatggatgacaaatctgagggacacctctccgtcttcatctctcggaccttctggctagcagctgcccaagacaacactccctcttctcaagacttttcctggggcctccctttcattacacgtgactggttgagctcctcactgcctgccatcttggtgtgctttgcgggcttggaccactaagggtggacagctctgtgctggggcttcctgtctacaccttcctcttcttaagtaacctcatttctcccatccctcttctgggccctcagctcacaaatccagcctggactttgcccctgaactcgactcatctatctaactgcctcttagatagacatgagcaaccaaccgcatttcatccatcagcaagtcccagcaagtttatctccagaaaataaaataaataaataaataaataaacaacaacaacaacaaaaaagcctgcatcccccctgcctcatcaccgcttgcctgggcgcccaaattaacctccttactgacaggtctccctcctcccctctatgccacactccctaatccactggtcacacagggccagaaagaactttgtaaactgccgatctgatatggccagctcccctgcatcaaaccctgatggctgcccgtggctgaaatctcaaacctctgggctctgactcctgcgtgaagacaggctgctggctcctcccgcgtggtgctcaccctggcctgctacagctcctcaaagaaagctcagtccccctcccctgggaacactgtgagtgcctgatgcccccttccccggcagctcagaattcagggccacctctgccactcttgctcatccctctgcaactcctgccccagctgggggtcacaatgtgtcactgaacatggattgctgcagactccagggctcaccacagtggctggcacagagtgggtgctcggtgaatgtcccacagagctgaactagaaggaaggtaaggagcagacctgggagggcctgggaatgtcaaggtctggggcctctccagcatcctgagggccaatggcttgaagcaggggggcccagtacctggctgaccccggtagcagggtggccagtggagtctgagaaactggaggaggggcacccgggccggaaggggcagaggcggaggagatggagagttggagatgggtgtggacgggtcaaggggcttctatctagagggtctctgctgacctgttcttccccagtgtccgcctggtcactccctccttcagttcattctaaagtcacctgctccaggatgccccccagaccctccaatacaaaccccctcctctgtgccctgaccctctggattgcctcccccattttattgttctctgtggcccttatggtccatctgtgggctcctttcatggatttatggcagtgacagtgaccagcagcctcccctccaagaacctggctccccctggaggcggcagcctgctggtgccgagatgtattctcagagcccaaagacaagacctttgacagatgcaggggaggtgggggcggccaggcgggcattacctccttgaactgggggtggacggcatcgcccacaagctgcagaatgagcccttcgctggtggagaggaaggcaccactctgtctcatgcgggccagagccaccagccggtccacctggctgtgagtgggagggagggagggaaggttggtgtggacgccgcagtctggacacccagacacgcaggcaccctggtgggaatgccgcctgtggcccttcctgggagcccctgatggcccccacgtgcacccacccaggcaggggccctctcacctgcgtgaggagcaggcgtccaccaccacatggacctgcagcccccggtctaggaggtccagggtcgtgttctgtgggtagagagaggtcagggccaaccccggataagaacgggggtcctgggtaaggaattggggatggtgagtcagaattaggggcccagaatggggaggagggaggctcggatcagaggaaggggcccccaggtcaggaggggatccaagataggatggggcccacaggtgaggagagagggcccaggtcaggatgggggtcctgcagggaagtggaggtttctggtcagggaaggaggttctatttaggatgggggtcccaggttagaacgagggacccctggggtcagtcagcatctcaccaagatgcaggcctgtgcctcaatgccacagagcagcacagagcgcagctggggccgactgtccagctcctgctgcagggcaggcaccatgctgaagcaggtcttggccagcggccgaaggccctcagtccccagctcgggcaccgtggggcccaggccttgtgggtactgctccgtcagcatgactggcacctcaagcagccgggccacctgtgccagtgatggggaagaaaggtcagggtctgagggaggaggggctgggcctggactcctgggtctgagggaggaggggctgggcctggactcctgggtctgagggaggaggggctgggggtctggactcctgggtgtgagggaggaggggctatgcctggactcctgagtctgagggaggaggagctgggcctggactcctgcgtctgagggaagaggaagtgggcctggatccctgggtctgaaggaagaggagttgggcctggacgcctgggtctgagggtggagggctgagcctggatcctgggtctgagggtggagggctgagcctggatcctggatctgagggtggagggctgagcctggatcctgggtctgagggtggagggctgagcctggatcctgggtctgagggtggagggctgagcctggatcctgggtctgagggtggagggctgagcctggatcctgggtctgagggtggggggctgaggtcataccttgagcatgcgggcagccactgagacgatctgtgggaagtaggcgatgttgtggcggaacttctcctgcatgtcacacaggaacaggacagaggatcctgggaggactcggcccaggctgggcctggcagccgccattttctgggggtgggcagagggacggtgggtcaggcccgagggctcctctcagtgtctccagctggcgtccaggtcctcacactcagagcctggcagggcccggggcaccttgccaaccttcttcccacctcaaggtctctgtgtctgctgttccccgggcctagaatgggcttctttcttatttctgtcctattcggcagggaggtgacttccttgggaagccttctgggccacatccacacgtggctccgggtgtccctctcctggtccctgtgttctccttgctgaggactgtgcacaacgtcaaggagtgcttcatgatcccggttaccatccgccccggttaccatccaccccagttactatcagtcccggttaccatcagcctcagttaccatctgccctggttaccatccaccccagtcaccatccgccctggtcaccatcagccccggttactatcagatcccggttacatcagccccggttactgtcagccctggttaccatcagccccaaaacggaggctctgctgggcgtcctcctgtgttgggccagcccactccccagggcctcctgaatgaagggtccaccctgatcctcaccctgctccaagaggaaactgaggccatattcttcagccataggaaagaagggggaccctgcacaggccacaacctggatagatctcaacacaaagaccacggagcgtgcgatcccgttttcctgaaatgcccagaacaggcaaatccacagacagaaagcagatggggccgggcgcagtggctcacgcctataatcccagcactttgggaggctgaggtgggcggatcagctgaggtcagttcaagaccagcctggctaacatggcgaaaccctgtctctactaaaaatacaaaaattagccaggcagtggcgggtgcctgtaacccagctgctcgggaggctgaggcaggagaatcgcttgaagcccaggaggcagaggttgtagtgagccgagatcacaccactgcactccagcctgggtgactgagcaagactctgtctcaaaaaaaaaagagactgggcttggtggcacacgcctgtaatcccaggactttgggaggccgaggcgggcggatcatctgaggccaggggtttgagaccagcctggccaacatggtgaaaccccatatctactaaaaataccaaaaatcagccaggcacggtggcacgcacctgttgtcccagctacttgggaggctgaggcaggagaatcacttgaacctgggaggcggaggttgcagtgagcagagatagcaccactgccagtccagcctggacaataagagcaaaactccatctcaaaaaaaaaaaaaaaagagaaagaaagcagatgattggctgccaggggctgtggccgggaggaattcaggttgactgctggggggtgtagttttcagtttgggatggtgaaaatgctctgggacttggtggtggcggctgcagaacagcatgactatgaatgccactccactgcattttcaaatggctgaaagggtaagttttatgttaagtgcattttaccacaattaaaaaaaaaaaagaaaagaaagaaaagaagagaaagaaaaaaaggacaggctggtgaagccacctggccagcaattcttttgcaggggaggaaacctcgacccagagggcccgttaacctgccctaagtcctgcagccatacagggcacacctgacttccactcggtcagagcgtctacgctgtcagagcgtctacaccgcaggggccctgaatcagcacgtcttggcctacgtccctgggaggcttgtgcttttgggtctccgagtttgctgcacaagtgagggtttgggctgggcttttgtctgcagctctctccccgtctgtgtgtacaatttgtttgtacttaactcatttattcattaattcaccagggaaatgggagaccctggaggctcattggaggcaagacagaaggtgttctgggaagctgagggaggcagggcactcaacaagaagctgctattttcttttcttttttttttttttgagatggagtcttgctctgtcacccaggctggagtgtagtggcgcgatcttggctcactgcaagctctgcctcccaggttcaaggattctcctgcctcagtctcccaagtagctgggattacaggcttgtgccaccatgcctggctaatttttgtatttttagtagagatggggtttcaccatgttggccaggctggtcttgaactcctgacctcgtgatccacccgcctcagtctcccaaagtgctggtgattacaggtgtgagccaccgcacctggccttgagctgctattttcaaagctgggtagttaggacactgttgttccttgtctttctttctctctctcgtcctggcctcaagcaaccctcctgccttggcctccctgtactattttttctttttgagacagggtctcatagtgtcacccaggttggagtacagtggcgcaatcatagctcactgcatccttaacctcctgggctcaagtgatcatcccacctcagcctcccaagtagctagagctacaggtgtatgccaccacacctggctaatttttgtatttttatatttttagagacagggtcttcctatgttgcccaggctggtctcgaactcctgggttcaagcgaacctcccgcctcagccttgcaacatgctgggattacaagcgtgagccaccgcgcctggcctattattctttgaacataatccatctaccatagcaaatgttttctatgtgcaccatatctcaagtttaaaaacgaataaatggttaaaatggtcaattttatgttgtgcaaattttatctcattaaataaaattgaatggaaactccctctgaaacaaaaccacagtgaattaatcccataattacaactgtgataagtgggatttggagggagtcagatacagcttggcaggggctgcagtgttctcctagagaaactgacgacagaaaaatgatcttttcacaaaacacaaagctattactcccctgtctcaaactgtcccctgacccccgtggattctctctgtcctcaggactaagatgcaggcgcccctttcccccccgccccgcactgctctgaagaccctccagcctcagcccagccactccctcctctcaaacagcccttgcggtttcctccccatggagtgaccctctcacggccactcatgtgctaactcttcctcccctgtgcaggaggcgggacctggacacccgggccccaagggatggttctgagggaaccaggagctggagagctgacaggtgggtcacaagggccctggagtctctctgctgagggcagtgaggagccatggaggggcagatctgggggccagcatgtccaaaagcctaggacaggcatgtggagcacccaggaactcccctctggcctggtaggagtgtgggtcacaacaactcctagggacagccgagcagctgcatttctcaaaatgatggatacacaaaccctctgacctcaaaagctgctcctaagcatttatcctacagacattcatgtgaaacgacacaggattattcattacaggactcttccccagagcaaaggagcagaagttaagtatcaatgtccacaatgagggtactggttacgtaagtcatgccataactatactctgttattcctcgcagccagaaaaaattacgaggaagctctttaagtaacaatacgaaaacatgtttgagagaagtgaaaaagaagcagaacagtgtgtatggaatgctcctttttgtgccaaagaaaaaagggagaggaaaatgtgtctgtgttgcctatatctatatctgctatctctggcaaacaagcaagaaacgggagactcaggcgggtgaaccaggcaccggggaagtctgtaggagccttttcactgggtcctattctgtttcttctgaattctggacaatgtgcaacaagttgtctagtcaatactatatacaataaagggttggcataaagccaaaacccggcaaaactgatctatggcgtcagaagccaggacagtgactgcccttggaccacagtgatggaaacgacgacggcgggagatcctgggatgtggcgcatgtttgacttttttctttggatacttgtttacaccagggtgctccctttataaatatttatttaagctgtgtatttgcaaaccgttcgattttctgcgtttgtggtattattccagaaaaagtgttcaaaatgcaaaatacaaagatggcttcaggcccccgccgtgcggttgaactggaggcaaaaggccagagagcaggaggtcggcgctggggcccagtgggacaggggagagtcaggaaggggcagctgggacggtggggaaagtcggggagaaaggcccccagtttctggtcgagcgaggggcatgatctgaagattcataggggatcccggggaggggaactggtttttgggagatgaaaaattggggtgagggtgggtgtgtgagagagagagatgtgaaggggaggtctgggctggagagggttgggcgtgtcctgcggaacgaggagagattcagcctgggtggagggtacccaaggccaaagggggcgtggctggaggtgggcggcaacagggggcggggtagggccgttgatttccccacccggtctcggaaacccggccttggagcccggacttcctggctgtgtgaccttgggcaagtttctctttgtcttagcctcagttttctcgtcggagaaatggggattaaacctgcccaccccccagcgctgttacagaggcggcaggcgcgacccggggacgcttccaatctctggccagccaattctggcggggccaggtggagtcctccttctggtcctgtgaccttggcccgggacgcccaggcagagcctcagtttccccatctgctaggcggtaaggtcggtctccaaatagcgccagcagcgagagaggacttacccggaaggtgccgggttcgagcccggaacggcccctctgcaggtgaggcgggggcaccctcacctctcggctctcggacggccaccgctgaggcctcttgcgggcttcccagggctggttaccgtttcgttagggctggacacgtggcccaccccctgcaccgtccgttttccgcccacttgggcccagccgtccaatcgacactcatcatgctctgcctcgccgctctctccggccaatccgcatgtgccactgcctctgcccgcaatcggcgctcaccaactcaccccgccccctgcctctcaaccaatccgcatatgcagctgctttgctcccgccccagggggggcggtgccggcaaggctgtcagtctcaagaaaatgattagctcgcaaaggcgccgtgggggcggggcagcaggtcgttctgccaatggagagccgtagagggcgtgagtggcggccgacggggcggagtcgcgcggtggtctccgaaggctcagactctggctggagagagggcgtctcggccggccccattgcacagagcagaccgccgaggccgggagagagagagaggggtcttacctagagtagaggcatgtctgcggttcgaaacctggccctctctcaagaaacggaggcttacaaagatacccaagcactttccaggaaggggctggctgagggagcgatcaagtgaggaatttgacgcccccctgtcctttgcgctctgtgctgcctcagtttccccatctgtacagcacctgcctcctcgggtggtgtttagaataatttagactctgtgcttggaaatggaggttgagagaaagagagaatttcctatctgtcttggaataaatccaaactcctcccaattcatggtcggccttcctggtccgtgcagacctcgcctctcaccactccccctgctcactccgctccagccacaggggtctcctcttgctcttccctcaatgtcccaccgcagggcctttgcacgtgtgctgcctcagcctggaatcctaggactccccatggcccaaccttccaggctttcaaagcctttcctgaccacctggtgtcaggtagcccttccatcaggtcgctgtttttaatttttttgaaacatcaaaaaaaagaaaaaaattgctctatcacccaggctggagtaccatggtacgatcacagcttgctgcagcctcaacctcccgggctcaagcgatcctcccacctcagcctcctgagtagctgggaccacaggtatgcgccaccacacctgactaattttttaatttttttgtaaagatggaggtctcactctgttgcccaggctggttttgaactcctgggctcaagtgatccgcctgccttggcctcccagagtgctgcgattacaggtgtgagccgccgcacccggccttgtgttttattttcttttcagcactaactccaatctgaattggaaatgaatcttgctttttgaaaaatgcatggatatactcttttattgtctgttccccgccaaaacacacacatgcacacagaacagggagctccctgaggcaggggtcccgtctgcctcgttcacagctgaatcctcaagtcctagacctgggcctggcccatagtaggcgctcgatacatctttgggaataaatgacaggagagcagacattaggcagaggtgagcctgggtgagagtgaggggtggatgcccagatggggctaggcagaaggaagggggaaggcaggaaagcaagaagaggtggaggtggggcccctgggcccaggaggagacccctgaggcagtggtctgaagtgggggtctgggttggtttattttcccaggggctgccaggaagggagtggacaggttgggggctcctggagagggctgtagagccgtcgtggaggggcctctggcttgtcctgggttctgggctgggttgtgattggcctcatggggagctggtcccccaaccctcggggatcccctgagaatcccaggcacgaggcacctcccagcagtccacccaaccccagtcgggagccacgagatcagcctcttcccccagggcatgctggggaaggggcagggggccgcagaaatgtgggacctgcctcaggtccagctggcccaggtcgcgatgggacagacccggcgctggcaggggagcatcagaaccagaggaggggtcccatggcattgaggcacactctggggtgagcgcaatgttgtcaaagaggtcgagggtagaggtgtccagggcagcgagactcaggctggcgctggcatggggagcctcagtgggggccacagcacaggccactcccaggaagggggatggaggcggtgggggtggcttttggagcgagggtctctggggaggtgcctcctgggacaggatggagagggccaggcgctgggtggcagcctcaatcttggtgaactgcctgtaaagacagatgtgagcaggctggtctctaacgcctgaactcaagcgatcctcctgcctcggcctttcaaggtgctgggattgcaggcttgagccaccacccccggccagcatatttgcaagggtcacctatgtggtcgcatcacaccgtgctagttatttattttggtgattcctgaccgtccgccacccccatgaaaacacaacctccacgacagcaaggaactttatctgctttgctaactggcctggcacacagtaggcactcaataaatgcacgttgactgttgctggcatccagccctgggggctgctcctctctgtctgtacctggtctcccccagccaagggtgctggttgctccttcccctcttccccgtcccgtgcccaccttccccaccagccccctcacctgcagatctggttgtgcagaaaccttctgtggttgggccgcctcttggggggccgggtgcgccggggctgcagggcccgcagcatgtgggcggccgccccgctcacaaaggcacacagctcccgggggccgggctcggagaccccagggccttcggggaccccggggtgcatggccagggtggtctggagtaactccccacaatattgctgaccaaagcaccccccaaatctgtgagcagggaggggcaggggactctggaggcccaggcaccccgggctggggaggaggcagggctgggaattgggccaaggcctccccactgtgccctaaccctgtccccacctcccaggagcccgacctgaagtctgagggagcggcaggtgggggctaatataggaaggcagggaacagggaggggagggggctttctggggccctctaagtgcccaattagcgcatagttggacctgggatatggacctggcgtgcgtcggcggggggcagagaatggtgcctggagatggccaattaagggaacaaaggcctcgttcgggaggcgaggccgccagtaagtcaaatgcagcgattgagcgtggaggacccttaattggagccgtggggagggggctgggagggaggggagctgggctgcatctgcccacccaccctcagacacacctgtgcctccctccctctgctcagcccagcaccttaggaggggaaaccgaggctcccaaaggggctggtgcgggccgaggtctccagccagcaggaggggttggctcctggagggtcacccccgaaatcctggggctcatagaatcctgagcagcagagtgagggaggagagggggaagggtgtggcaggacgggaggggacgggagaacagggcgcagtctcccccagggtgttttattgaggcactgggacccctggtgtctgtgggaggcagaggttgggccgggtccccttgtttctggaagggtgttggccggagcggggaccctgggtctcaggttgggtaggggagcaccgggtgtgacagcctcagtctctgcttggacccccaccctcgggggtctgctctgggaagccaggatgtttcccgaaattgatgtaacaaatgaccacggctcagtacctagaaccgcacgcgctgattctcctgcctgaagcagggatttaaacctgacatcatgagtttgcttcccaggcccgctcactggccagcagcactatgggcaaggtcagcagttgaggtcctaccaggcctagggtgggggccagcaggcaggtgggggcatattgggagctggggctgagtgcagccagtgatgttgccagaggtccagtttcctgtcagcaggacatggtgagaccagctgcagtaggacagacagacacccagtgccctcaccagccatggcacgtacacgttgactgctacccctgccatgctcaacactaccactgtgctgaaccactgcacaggtggggctgctgggcctggtgtggctggtgtctgtgttggggacaccattggcctcccatgtttctctcgggtgtctccaagggtctccagcctcctagacagcctcttgtactctgccccttggtccctctgcctgccagctgtctgtgactcacactagccccattgctatctctccatctcgcccacccttgctcgttcctcttctgctcctcctggctttctgtccatccctgggttatccacaattctctcaactatcatctatctatcacctgcctatctatggatctatcatctatgtatgtgtgtatgtatgtatatatctatttttagagacagagtctggctctgccacccaggatgcactgcagtggtgtgatcctggctcactgcagccttgacctcttgggctcaaggggtctttccacctcagcctcctgagaagctaggattacaggcacctgccaccatgcttggctaatttttttcttttgtagagatggggtctcactatgttgcccaggctggtctcaaacttctgggttcaagtgattctcctgccttgacctcccaaagtgctgcggtcacaggcgagagccaccgtgcccagcctctctcctctgtattgtctctctgacttcatctctcccatttgtgttccggttcctctccctgtctctgtctctttcactgtctctggagtttctctcagtgtttatgttttagactctgaatgctcttcactgcctgtctctcagcttttctgtttctgtctctctgtcttccccagggcatggtgtgtgtgtgtgtgtgtgtgtgtgtttgtgcacgtgtgtgattgttactggatggtactgtgcagttccagtctcctggtgtccaaaacaaagaattggatgagacgcgcacagacagcaaaggaaaggagcaaacgtttatgaagcacagtattccactctcagaggggagagcggactgagctctccgagatgagatcagccccagtttgttacatttcatggccttttttttttaaaggactctttttaaattttttttttattttttatttttgagatggagtcttgctctgtcgcccaggctggagtgcagtggtgcgatctcagctcactgcaacctccgcctcccgggttcaagtgattctcctgcttctacctctagagtagctgggatcacaggcgtgtaccaccatgcccggcgaacttttgtgtgtttttagtagaggtggggtttcaccatgttggccaggctggtctcgaactcctgacctcaaatgatccgcccgcctcggcctcccaaagtgccgggattacaggcgtgagccaccgcgcccggccgtacatttcatggccttttatatgtttttcatcacttccttaacctcactttatctcttgtaagttagttgctcatccttgcctaatctttctttatctcttttgaccaaattgctcatctttagctttatttttcgtggccaaactgctactgcaagtccttctggcttattttccttatcctgcatgttccaactcactgcttcctcccttatttcgcatgtcctgcttctgccatttgacacgttttgcttctgcttaagctaacctatgtccaacggtccccttcgccccccgaatttctctgctattctcctgcctcaagatgtccgtgagtctggttcacgcctgtggtattgggggtggcctgaaggtgaaggtttcctgtcctgttctgctccaggtctcaggtacagagggaagggtccagggtcccttggcaagaggccgaagggagaagacccctgggtctctggaggatgggaagggaaggattggctctgagggccgggaaggggcccgccgccacgtggctggggtatgacctttgctaccttgatacacactttatcgtgtgtattcacatctggtagctcttatttcaaaatttgcattccacagtccaggggccaagagcaacatccgccggccagctctgtcccactcaggccggccagcaatgcacagggcggccgcctgcaggctgcggcctcgggactgtccaccagggggcgcccacccggccggtgctgggcggcccggctcaaggggtgcggcccgagaacttggggccctctcctgtctcctgtcattgagaacaatcaaccacagcagggagctggcttcatggggtctttgttgaggacctgcacttccaggtgctggaaggtcttccccagcctcctctcccctatcccagcccttgaaattctgtgtgtgttgggggtggatttagtcattcaacaaacatttattgagcaccttgctttactgagcagtggaggaggtgaagtcagagaagccgagggggcgcggggagcagacctgccgggctttgtgagccaggcaagggttgggctatgagggtaagcatgatggagaaccatagagggtttggggcagggtctaacccaaccttctttgcaggccttgctacagctggaatgtggagaccccaccctccaatccccctacaatctggatgggggtgtcagggccaggccaggaagccagggacaacccagggtgtgtccttccctgtccccacctgctcatctgctatctgctccctctcatcca[144 bp omitted]gcctcccaagtagctgggactacaggtgcccgccaccacgcccggctaattttttgtatttttagtagagatggggtttcaccgtgttagccaggatggtctcaatctcctgacctcttgatccacccgcctcggcctctcaatgtgctgggattacaggtatgagccactgcatgcctagtctttttttttttttttttgagacagaatctctctctgtcacccaggctggagtgcagtggtgcaatcctggctcactgcaacttctgcctcctgggttcaagagagtctcctgcctcagcctcccaagtagctggaattacgggcgtgcaccaccacgcccagctaacttttgaatttttagtagagacagggtttcaccatgttggccaggctggtctcgaactcctgacctcaggtgatccgcctgccttggcctcccaaagtgctgggattataggcgtgagccgccgcccctggaccccttaaaatttattataaaaatgtacagatggcagagtcacaatgcatcaccctggtgttcccaacccagacgcagaggggccaaccctgtcgtatttggttcacaactcttcttctgagagaaggcaggccttggctgcctgtgtccccccagattcagatgttgaagttgtaacccccatgctccagagtgagacagtat[132 bp omitted]gaaaccccgtctctactaaaaatacaaaattagccggatgtggtggttcatgcctgtaatcccagcttctccggaagctgaggcaggagaatcacttgaacctgggagatggaggtttcagtgagccgagagcacaccattgcactccagcctgagcaacaaaagtgaaactccgtctcgatgaaagaaaagaaaaggggccggacgcggtggctcagcctgtaatcccagcactttgggaggctgaggcgggcggatcacaaggtcaggagatcgagaccatcctggctaacacagtgaaaccccatctctactaaaaatacaaaaaattagccgggcttggtggcgggcgcctgtagtcccagctacttgggaggctgaggca[137 bp omitted]ggagaagggaggggaggggaggcaattaagttaaacaaggccattagggtgggccctaatgcaatctgactggtgtccttacagaagagattaggacacagacacacacagaggggccaccatggaggctccacaaggaagacaagcgtctgcaagccaaggggagaggcctcgggggaaagcaaccctcccgacaccttgaccgcggacttctgtatccagaaccgggagaaaataagtttctgttgttggggccactcagtgtgggactttgctatgggggtcccagcagactcatatatataatgagtgtattcgctctctacgctgtgtaagaaatagccactgatgcaatggctttaaacaacgtacattcattatctcacagttccgtggccaggagtccagcaccgtggtttatcttggtcctctggtcaggatcgctgcaatcctcgagtgacccagggctgtggtctcatctgaggttggggtccgctcccaggtttacat[136 bp omitted]gacccccgagtagctgggactacaggcgcccgccac[138 bp omitted]cccggcctcatttccgtgcttctgaggaaggcatggagccctgggttcacggccagcaggagaacctcagtgcttcccatctttgatctctaggtccagctttaaagagctccactgactaggtcagatccacccagggtaatcttcctgtattagtcagggttctccagagaaacagaatcaataggctatgtctgtctatccacccatcaatcaacctatacatccatctatttatccatagattgatctatgaggatagcgatagatatgaatagctacaacaatatagatacatctctccagaaagagagtgattagaaggtattggttcatgtgattatggaggccaagaagccccatgtttgctgtctgcaaactggagaaccagaaaagccagtggtgtagttggagggcctgagaaccaggagctgatggagtagattccagtgtgagtctgaaggctggaggaccaggaggcccgagggcaggagaagattgatgctacagctcaagcctgagggcagggatggagttccaccttcccctgaggctgaggcccacccaccctgcgggaggctgcctgcttggctcacgctaccaattaatctcttccggaaacactgtcacggacacacccagaatcacgtttaaccaggtacccgcgcatcccgcggcccagttcagtacatgcataaaatttaaccgtcacttttccccttgatgaactcaaagtccactaatcaggatcctattttttttttttttaatgagacagagtttcgctcttgttgcccagcctggagtgcagtggtgcgatctcagctcattgcaacctccgcctcccgggttcaagcgattctcttgcctcagcctcccaagtagctgggattacaggtgccctgccaccatgccctgctgattttttgtatttttagtagaaatggggtttcaccatgttggccaggctggtctcaaactcctgacctcaggtcatccacccgccttggcctcccaaagtgctgggattacagatgtaagccaccgcgcctggcctcaggatccttgattgcatctgccaagaccccccttgccttcaccatatcacataaccatcacatccacatgatgcaaaggcactcacacaagggcacgggtccctgggggtcatcgtagaaggtagcagccactcttagggaggaaatttagcatgcatctgtccctgtccgtttttgcacttaaaatggaggaaggttttacctgtacagatggaaccctgtatattgttgcttcctccagggagtctgccctggtttcccccaggctgcgtgaggaaggttttacctgtacagatggaaccctgtatattgttgcttcctccagggagtctgccctggtttcccccaggctgcgtcaggaaggttttacctgtacagatggaaccctgtatattgttgcttcctccagggagtctgccctggtttcccccaggctgcgtcaggaaggttttacctgtacagatggaaccctgtatattgttgcttcctccagggagtctgccctggtttcccccaggctgcgtgaggaaggttttacctgtacagatggaaccctgtatattgttgcttcctccagggagtctgccctggtttcccccaggctgcacgaggagtctcccctggctcccatgtcctgggcagcctccatgagtgcctgaccgtgcatgtgagacctgctcgataggccttggaagtgggtggactctggggttgggcacattcctggtccaaccacttctgggctgtaggaattccttcctggttacaggacactacatcacttcctggttctgtggcttggccatgagacttcagagggccttgccttaccccactgtgaaatggggatcacaccccttctgagtggagaggcccgttagcttggggccggctggggctgccacgggggccttaagagatgtcagaagggagcatcctggccaggtgcggtggatcccgcctgtaatctgaacactttgggagaccgaggcgggtggatcatctgaggtcaggagttcaagaccagccaaattagctgggcatagtggcaaatgcctgtaatctcagctactcaggaggctgaggcaggagaatcatttgaacccgggaggccgaggttgcagtgagccaagattgtgccattgtactccagcctgggcaatagaatgggactctgtttccaaaaaaaagaaggaagcatcctgagtctgtgggaggcaagggcctgccccctgggtcccctgttccgggggatggccggcaaccggtgactccctttgcccgtcccctccgccttcaacctaaaatgcatctctggttccttacccgacttgtttggaaaaggacgttttatttttcatcgctggccctgggaatccagtcattactccagatccctccttcactccctgaccccactttctggagagggagggaaagggagtggcaggtcccttctaaagccttcggctgatcctcctgggatgggggtggatggagaagaatctcccaagtgcgtgcagggcctctgggcggaagtgacagcacagtccccaggaaagggtgggtacctagaggggctgaatggtttacctggctggcagggggcagggctcagagtctgaggctgggcaaggaggctgatctagttggggtggggggaaccgtgcccccaaaacacctggtgcggggtgttgttggccagaaacagaaacgtctggggcctgcaggggtgcaggggtgtgcatccgcgcgtctgcttggtcctgcgtttgaggctctggaggtccccttgctgccctggagctttatcccccgctgggcttttccctgcagcactgagcagcgggtagtctgtcttctttgttaccactgcatgccctgggaggttttgtgagctcactgggatggtgagttttttattggttttccccctccacattgctatgacccagctcccagggcaggacctggggtggagccctggtctggactgtgggtgggagcgctgctgggcctggaacagctgcagctgaggattctgtgtgatcttatccatgtttttggctatttgattctgtttttgtctgtttgtttgtttgagatggagtcttgctctgtcgcccaggctggagtgctgtggcacgatctcggctcactgcaaacctctgcctcctgggttcaagcaattctcctgcctcagcctcctgagtagctgggactacaggcacgcgccaccatgcctggctgatttttgtatttttagtagagttgggggggggtttcaccacgctggccaagctggtctcgaactcctgaccttgtgatccgcctgcttcagcctcccaaaggcctgggattacaggcatgagccactgcacccagctgattctgtttacttgtcagcatgagggacctgacaacatcccttgaagggctacacagatgttccggggggttaggagacaaccccacctccccatctgggtccctgagactcctccttggcctggaaagtgctggacacaaggctggcctgagtttcctccggtcactgtctccaaggggctgcgaggctgttctgaaaacaaacctgttgaatccacaccaccttttcagagacagcaggttgcccaaggccattgacttcaaaacctttgttcaccttctggctgcaaagtggggaatgttaaggagagtaagagccagtcttagccatgccaatctctctttctttttttttgagagggtctcgctctcttgtccaggctggagtgcagtggtacaatctcggttcactgcagacttaacctcccaggctcaagcgatcccctcacctcagcttcctgagtagctgggactacaggtatgtacaccacaggaagcttattttttgtagaaatgaggtcttgctgtactgcccaggctgggtgtcccatcccttttgtaatgcctctgcgtgggcaggtaaatgaggggggctgagctgagggcccctttcactactgcagagaccaaaatggcccgaggcaagggggacggaagtgggatccgcacctctgggctttcctagcctggcagccagctgggcagtgcattcccatccacgtctccaccctgcatggcagccgctttgtgtggttaatgctgacgtgaaaggaatgttgggctgagctggatgccaagggtttttacacgcacgaatgcacggagacatcagcaccaagaccctgtaaggtaggggtgggtccacaccaccgcagatcagccctgagttccagcctgcttgtggacttgggaaacggtgtgggaggctggaaaaatccactcattcaacaaacaagtaccgtctgcttctccatcagggcccatgctggttgtttggaatacctgggcagcaaagacacgaaaggtcctcgctgtcatgggacatagataaatgtcgctgagcatgtaagagggacaccacctagcacaggaggctttccagtgggatcttgctgggcagggatgggttaagggtagaagggccttctggcctgagaaacagcatgcagaatggtcttcaagctgagggtactgcctttgagcagtggctctcaactagtgaacatgtggcaatgtctggagatattctttttgttgttgttgttttttttttttaacacagagtctcactctgtcaccctggctggagtgcagtggcacgatcttggctcactgcaacctccgactcctgggctcaagcgatcctcttgcctc[134 bp omitted]cagcctcccaaagtgctgggattacaggtgtgagccaccgcgaaaatctctatctggagatattctgagctctcctacggggtgtgtggagcggggctggggatgctacctgcatctagtgagtgggggccctagagtgtgtaggacagtccccgctgcaatgaatccatcccaaatggcactagtgctctggttgagaaactgcgtttaatgaccctcagaaaagccagtgtggctggaacgctgggttgggcgggggttgagcgtggagaggggctttggagcagctcggtctcccactaaaaccctaggccccacaaggagtctgtggattccagcctcccagaacagacctttgcccagcaggaaccaggtttctgcagcgtctggatgagcgtgcacgaagcacacgcccgaaaatcctgagcacgtggctctaccgagggactggaagcgctccaggcctcgttttcccgctggagcgattacaccctgggggcggggcccgcttcacgggagggatttttgtacaaccgtggtgcatggaaggatttttttgcagatgagagggaatcgggattaataaggggaacttgcgaccccgcgtctcgagctggccgtccctggccttgggctcaccggggcctcggcccccaagacctgacaactggagtccgcgaccacaactgggagaactacaactcccaggatgccgcgcaccgcctgcgcccgagctcgacgaggcctcgcacagccaatgggagggtccgggggcgggaactcggagtacgtgcgttgtgacgcaccgacggcgacgtcggggtttgtgtgcgcgagaggccgccgataaaggttgggtgcctcgcgccgggggccgttgggagggagtgcgcccctgccccccctccccggtccccacagctgcaccgccgctgccggggccccaccttcccgtcgacccccgcgggaaggtcctggggctgccaccctcgttcccccgattggggccgcaggtgagagaccggagggggtgggggtggggggagggaccggagggcggagaagttgcagggggtggggcgggggggggggcgtgaaaccggaaggggtaccttaaaggggagtcactatttcacctccgacatttgccagctaggccgggtccgccctcttaaagggcaaggggccacattgagagggcgggtcaggctttgcatttttacagaagctttctgacttaaaacaatgtttttcccctaaaaggcggttatctcattaaaggccagtgaccgtttcccagacattgaagcaaaaactcctgagtcctggttgcttcaaagcgatccctggtttagctcaacaaaagtggagatggggctccagtggcagcatccccttaaaggggaggtccagcctgctgaacgggtgtggcgcggccttttaaaggggatgtcttcttgttaaatgggaccccgctctttcagggcacggatatctcttttaaggagatgctggggcttctcaaaggcacgtgcagcttcttagcatcagtaggtttgttttttttttttttttttttttctggagacggagtcttgctccgttgcccaggctggagtgcagtggcgcgatctaacctgctt[225 bp omitted]gaggcaggagaatcgcttgaagccgggaggcgaaggttgcagtgagccgagatcgcgccactgcactccagcctcggtgacagagtgagaccctgtctccaaaaaaaaacaaaaaaaacacacaagttcttgtagcttgtccgacggggatgcctagccttcattcatttaaaatttgtttactgcgcacacactctgccagacattattgtaggcactgggatggcatacaacagtgaaccagacagaagcccctattttcccggcgttgacattctagcatggggaggcagaataaaacagaaagcacactggttatatagtagcggttctcatctgggggcaacggtgctccccaggggcgacactgcggctaagactcggaggtgcaggagtgagctttgtggacagcgtagaggagggcttcataggccaatgtcaggcgtccagtgggtcgaggccgggggccagggctgctgctcgacaccctgcagtgcacaggacagccctcaacagagaatggtctggccccacatctcagcactgctgaggctgagaatcctggtacattagaaggtgataattgctgcgggggaaaaataaggcaggaaaagggaatggggagttggaagggattgtagatttaaatagggctgtcagggaagctcttgcagaggggatttcagcgaagactcggaggtgaaagagcgagtggcgggcacaggtggaaaggaagggggtggttctaggcaggtgccctgaggtgggagcaggcgtgcctggccatcctgggtgaccagagtgaccaggggcaggtggccagtgaggatagcagtaggacaagtcagggaggggacaggctgcaggaagtcggcaggctcgaagaccagaactgtggcagatttctgagtacaggaatgcaatgcccagccctccctgttgacgggttcgcttcagttgctgtattgggaacagacgggtgggcagggcacgggtggaaacacggcgatccgtggggaggctgttgcagctgcctgggagagagacagtggtgcctcagatcaaggtggaggcctgtgagaagtggccagatcttggatatgttccgcctggaaggggaatctgcggacaggggcaatcgagagagaggaggcgaggagcctttggcctgaggaagaagacggctgccattttcagagatggagaagctatgggtggagtagaagttgggggcgaggagcagaagaccatagttagattttgggcatgttaagttggaggtgtctaatgaggcatccaggtggaacagtctagcaggtggtgtggcattcagagggtaggtcttatagagctggaggcctggagtcattgttcatagacagtggagtcctgagagtgggtgggggctcccagggagagaggacagacagaggacaaagtggtgccggagccccgggcgctcccacatctagaggtcagggaggtgagaaggaaccaagctggggactgagatggggtgacaggtgacggagggcagtgagggagcgaggtatcccggaggccagggggaggcgggccacggacccagtgacaagtgggccattgcgggccacgcgccgcccaggccatggagtgggggcacccgcgtgggactgaaggggtttgcgctgggaaagagcgggctgacacttgagctgctctgctgtgaaggaatggagaaacgagtctgcagctggacagggaagtggagtgaagagctttttggtttttaaagatgggagacatagattgttggttctgcagatgggaacgtccaggagaggaggaaaagtggaggatgtgggtgggaaggcacagtccacgggcactgggtcaggcctgtggggaaggattgcgcagggtttctggacctcgcactgctgacattgtggatgggattgttctccgctgtggggccgtcctgtgaattgtaggatgttgggcagcatccctggcctccacccactagatgccaggagcacttgcctctctagttaacagataaccccaaatgcctccaggcattgcgggatgtcccctgggttgaaggcacagtttgtcccagttgagaaccactagtatcgtggtcagaatgtgagaaacttcgcgtctgattgcttttattttcacagaggcatgatcaaggacagggttgcctgccaagaacaggaggggagaggaggggctggaggtttcaggagaaagaagcatgtcaggtagtcacctggggagtgcatgggccagagacatgtagtgtgagccagggagggtgatggtgagggggccgcagattttgtgggcttgaagggaaagtgagactgaggccaggcaagggggtgcctgtcatggccacctgcagcgtttgtgcagggtcgggcaggagtgaggatgtgggttggctggaggtgaaagggcgcgctggatggtagatgggctggagtctaaggatttggggagttggagcaccaagctagagtgacctagaaggctttgtggtgttgggaagtaggttgttccaggctcaaccatgaggacactttttttttccttttttttttttttgagatggagtctctctctatggcccaggctggagtacagtggtgtgatctcggcttactgcaacctccacctcccaggctcaagtgattctcctgcctcagcctcccaagtagctgggattacaggtgcctgccaccacgtccagctaattatttatttatttaattattttttgagatggagtttcactcttgtcacccaggctggagtgcagtggcacgatcttggctcactgaaacctccacctcctgtgttcaagcaattctcccgcctcagcctcctgagtagctgggattacaggcgcccaccaccatgccgggctaatttttgtatttttaatagagacagggtttgaccatgttggccaggctggtttcaaattcctgatcgcaggtgatctgcctgcctcagcctctcaaagtgctgggattacaggcgtgagccacagtgcctggccccatgaggaggctttagttaaaatgaaaaggcttagggtatggcagtgggaggagtgttgaggccgagatggaggataaggtcttagagggagagcagcaaggaggagccaggagagcctctctgcgtgtggtcttcagggaccctgcctgtctggagagggagggagcagactcctacaggcagtgcttgctctcttgaaggcgggccccagccttctcagacctggctagcctcctaaggagggtggccacagtttgctggggagtttccatttcagcactgaaagtgcagcatcgctggcacctgctcaagtcccaagcaaactgggaccattggagaccctcatcctaaggaaggtcccctgcaaagtgggtgacctggggaggtagtccctgtcccttaaagagcccgtgtgtgggtttggggttgagatgatccagtgcgggggtgagccgctgacccagaatccctcccccaggtgtgatggtcggctcccacgcggacatggcgccggcctctactgcggagggggccggggagaagccaggccctgcggcccctgccccggcggcccagtacgaatgtggggagtgtggcaagtcattccggtggtcgtcccggctcctgcaccaccagcgcacgcacacaggcgagcggccctacaagtgcccagactgccccaaggctttcaaaggctcctcggccctgctctaccaccagcgaggccacacgggcgagcggccctaccagtgccccgactgtcccaaggccttcaagcgctcctctctgctgcagatccaccgtagcgtgcacaccggcctgcgggccttcatctgcggccagtgcggcctggccttcaagtggtcgtcccactaccagtaccacttaaggcagcacacaggcgagcgcccctacccgtgcccggactgccccaaggccttcaagaactcgtccagcctgcggcgccaccgccacgtgcacaccggcgagcggccctacacctgtggagtctgcgggaagagcttcacgcagagcaccaacctgcggcagcaccagcgcgtgcacacgggcgagcggcccttccgctgcccgctctgccccaagaccttcacccactcctccaacctgctgctgcaccagcgcacgcacggcgccgcccccgccccgggtaccgcctccgcggccccgcccccccagtcccgggagcccggcaaggtcttcgtgtgcgacgcctacctgcagcggcacctccagccccacagcccgcccgcgcctcccgccccgccgcccccgcccccgcccgtggtgcctgagctctttttggcggcggcggagaccacggtggagctggtgtaccgctgcgatggctgcgagcagggattcagcagcgaggagctgctcctggagcaccagccgtgccccgggcccgatgcggcgccccagccccaggaggcacccgccgaggcgcccaaggccgaccagccaccgtcccctctgccgcagccccctcctcccgccgccgcccccgcgcctggctttgcctgtctgccctgcggcaagtccttccggacggtggctgggctctcccgccaccagcacagccacggggctgccggcgggcaagcgttccgctgcggcagctgcgacggctccttcccgcagctggccagcctcctggcgcatcagcagtgccacgtggaagaggccgcggccgggcgcccgcccccgcaggctgaggctgcggaggtgacctgcccccaggaaccgctggcgcctgccgcccccgtcccgccgccacccccgtccgcccccgcttctgcggagcggccctacaaatgtgccgagtgcggcaagtccttcaagggctcctccgggctgcgctaccacctgcgggaccacacgggcgagcggccctaccagtgtggcgagtgcggcaaggccttcaagcgctcctccctgctggccatccaccagcgggtgcacacgggcctgcgggccttcacctgtggccagtgcggcctcaccttcaagtggtcgtcccactaccagtaccacctgcggctgcactctggcgagcggccctacgcctgcggggagtgtggcaaggccttccgcaacacgtcgtgcctgcgtcgccaccgccacgtgcacactggcgagaggccccacgcctgcggtgtctgcggcaagagcttcgcgcagacctccaacctgcggcagcaccagcgcgtgcacacgggcgagcggcccttccgctgcccgctctgccccaagaccttcacccactcctccaacctgctgctgcaccagcgcacgcactcggcggagcgccccttcacctgccccatctgcggtcgcggcttcgttatggccgcctatctgcagcggcacctgaggacgcacgccccggccaacacgcctcccagcaccacagcccctgccgccggcccccagccccctgctccactggctgctgcgcgggccccgccagccacccaagatgtccacgtcctgccccacctccaggccacgctctccctcgaggtggcggggggcacggcccaggccccgagcttggggccagcagcgcccaactctcagacgttcctcctggtgcaaactgcccagggcctccagctgatccccagcagcgtgcagccccctacacctccgccccctcccgcacctcccaagctcatcctgctgccctcctccagtgctggggctgggggcggccgtgcaaggcagggcccgcgggcagtggggaaagcgggccagggggcgggagtggtctggctgccaggccctgggggtctaggggtgcagggagcggccagcgctggggccagcgggacagggcagagcctcatcgttctgcagaatgtggggggtggggaggcagggccacaggaaatgagtggggtgcagctccagcccctccgaccagccccagaagtaaccacggtccagctccagccagcgcaggaggtgaccacagtccagctccagccagcacaggaagtaaccacggtccagctccagccagcacaggaggtgaccacggtccagctccagcccgtggccggccagctctccaattccagtgggggagctgtggctactgaggcacccaacctgctggttgttcagagcggggcagctgaggagttgctcactggcccgggccccggggaggcgggggatggcgaggccagcactggtgtggtccaggatgtcctctttgagacactccagacggacgagggcttgcagagcgtgctggtgctgagcggggccgatggcgaacagactcgactctgcgtacaggaggtagaaacacttcctcctgggctgacggagccgcctgccaccggcccacccggacagaaactcctcatcatccgcagcgccccagccactgagctgctggacagcagcaacactggaggaggcaccgccacgctgcagctcctggccccaccgccgtcaggcccagcctcgggccccgcggggctccccggggctccagcctcccagatggtgcaagtggtccccgcaggagctgggcctggtgttatgacccctcagggcctgccctccatccagattgtccagactctacccgcagtccagctggtgcacacgttttgaggagaggcagtgattcccctcccgccccgcacagagaccccgactcactgccagccggggcggggcagggtgccgcaggctgggcttgctaataaagacccgagtctccccgcctgtgttttgttttcctggggggagggaagggggcaaagtcatggtcctagcccccgcctgggagcgtggagtcttaagtcttgcgtcctgggtcgcagatggcttgttctgcatcctggggccagccactacgtagggctcagttcccctgtcctgaaaccaaaaaaggccgcaggggtcattatagtggggaggtggtgacatcagactccagggagtgctacttgttcactgtaggtcgccccgctgcccccctcgtgtgagaagtagggggatccttatgcggaagggttctgcgaccccgggcgccccgtgggtggagtggggtccctggggatgggggagtcgggcgccaggatgctgagcgtggccggctcctcccgcgaaggccccggcacggatgagaatccacgcgctggcgtcgccgcccggcgctcaggttgctcagcaacgagggaacgtggggcgggagctcgcgctggtccccagcccgccgcccgtctcctgccggcttccgctcccgttcttccccaggtcccctttccccgttgctccttctctagggataggagaggtcgcttcccggccctccgcagggtcacagctcggttcctcccagcccgccctccggggagcttagcaacggttgctacggcccggagcgggcgccgccccgccccaccgcgcgcggtctgacgtcacttccgcccgcgacccccttccagacccgctcccgaaaccttgtcgaaggaccaaaggcgaccggtgcaggtgcttgctggtccttgttcttgtggcgcgggacggggacgactgtgggggagggggcgctggggaccggggtggagcgagcgtggtccgttctctggcatgtggggagggtgttcgtggaccccagtgcctgggagggagccccgtgctgcagtgttggcgtccgcagcgcgtttgggagtgtagatcgctgaataatacgggggaggggggatcccgggagactttagcaaggtcgctgagtattgtggggggcgcctgtcctgccgagatcctcgcttgggggccccgagggttctcagtgtcctgatctgggaagtgccgttgctgctccctacccctcgggggagctttggggacagaggtgcccccctgacgctgacctacttatgttctcaccaggtgcacgacgccagctcccttctggggggccggggcctgggggttgccatggcccccagccacctgtcagtgcgggagatgagggaagatgagaagcccctggtgctggagatgctgaaggtgagaggcaggggccccagggggcctgggagtggctgcagtgggggaattgcaagtggattcagccaccccctcccacccacctgagccagcctggacccctggagcgggatcttttcctcctgagcctcagccgccctgctgctgaaaaccacagcaggtgtggcaggtgggggctcacccccccagccctactgggaccccagcaccaacgccctccctggtctcccatctccagtcggctgtgcacgccagcacaacagccagctctgtgcctcggaccccaactcttcaaagcacagcccagcaccccaacctagcccagcagcctccctccagcctccactccagcctgaggcaacctccctgtccttacttccctggggcctcactgcggcattgctactgaattgagtgcccccacagctcctaattcactcatccatccatcattcgctctcgttcattcattcactccatacccagtgtgccacactgaacatcggactgtgctgccttcccttcccatttgggagctctcaccccgccccgggcagggtctacctcctctctttgtccaggaggccctagcgtttcggatggctgagccacccctcctgcccacaggccggcgtgaaggacacggaaaaccgcgtggccctccatgccttgacacggccgccggccctgctcctcctggcggcggccagcagcggcctgcgctttgtcctggcttccttcgccctggccctcctcctgccggtgttcctggctgtggccgccgtgaagctgggcctgcgggcccgatggggctcgctgcctccgccgggtggcctggggggcccctgggtggccgtgcggggctccggtgacgtgtgtggggtcctggctctggcccctggcacaaatgcaggggacggggcccgggtcacccgcctgtctgtctctcgctggcaccgccgccggggcgtgggcaggaggctgctggccttcgcggaggcccgggctcgggcctgggctgggggcatgggggagccccgggcccggctcgtggtccccgtggctgtggccgcctggggggtgggagggatgctggagggctgtggctaccaggccgaggggggctggggctgcctgggctacacgctggtgagggaattcagcaaagacctgtgaagctacagactgacagccagggcaggggaggagggaggggcgccagcacctgatgatcgcctactgtctgcgggttcttttacctgctctccctcagtgagtcctcaaccaccctgggcccagaaacagaggcctgccgaggggaggagcctggcctctgtccacccgtcagcagtgtgaagtctgttgtgtttgagcttctcagagtggaatgactccttttccttcctggccctcgggggcctctcgaggtcagcctctccaacccctacctcagctcctgtctgcactgagaaacctccccgggtgatgtctgcaaagtctgtgctgtccgtgccccaggctgggagagctatctggggagggggagaggaggccgagcagaatacaccccagagttagggtttgcgactccgcctccctgggacctggattgggtcagatgcctgtccttggaggggacaaggttgactgcttaggaggcgcgacgcacagggctgccaggcctggcccctctctgggaaggttgagagctgagacgggcagccctgtcccttcctccagatccgtctggttttttacaccgtttgttaataaagcctgaaaccgctgtgtgcctgtctcttctctgatggctttcccagtctgtctccggacacccccgcccatttctgtctggcttctcctttccccagttaacattaattgttgggggacggtgctggactgggagaaggggaggctgtgagctcaggggcagcccgaggccctgccagcccttctgagtcacgctccccattaccgaattttttccgcctcacagctgcctggtgtgcaggcagtggggtgtgtgtgtgtgtgtgtgagtgtgtggaagagtgtgtggagcccctccccttcccaagccttgacccttgtgctgcttatcccccgaccccagctccctctgggacagtgaagttcaacctctcctctctcagctggggactgggggcttcacactcagatccaccagtgagtgggaggactggagggccgggtctttcagtctcttttcctaacccaggaagtccctcctggtgtctggctgcaaatcttcttgctgctgcaccaagaaccccaggtctgcccagcccccaaccctagcagtggtctcactggatttccctgaccagacaagaggggagacagcaggtgggcgcccctcccgctcatgctgcgccccccccgcacacgtcccccaacccctgtcctgtgccttcctgcagccggccaccccctaagcatctctgggcacagcactttgctggctggagcctgcctggccgtcgtctccatctcccgtgtgggtgtctgcagttggacaccctccctcccgcccgccacccccctcccccccatgcctcagcagacggccagccccctcccgccccccctcccccccaccgtcccctgccgcctccctgcagcctctttcttcctcctggcaaagcgtccagccctgcctgctcctcctcgggcctgggcgcctccagcaggcacttccctccctccctctctccccagctgcctcctcctcttctctccccgctctccttcccctttcaccccatcccctgccctggctgcaaccatgagggtcttggcctgcctccttggtgagtgatccattctccttggggactcggggggcctaggcccccacctctgaccccttagcttgtccagtttagggactcaaacttccgggactggtcgctggtgctcctgcataccctgacatcccttctgaggatccctgctcaatctgcccagccttctgccagcccagaagcccaagggacctgccccctgcccgccccccagccctgaccctgcgggggatctcccagacatctgacctttagccaagcccatgtgtgtgtgtgtgtgtgtgtgtgtgtgtgtgtgtgtgtgtgttggggtattcaagatgaggggcctgcgctggagaaagggccacccccggcctgcccctcacactgccccaccctccgccctcccttccagcggccctggtggggatccaggctgttggtaagtgcccagactcctcccatctgcccgcccccccccccaggcctcccccttctgcccatccaggcctggcctcacccccactgggtccccggcccatccgaattccactgtgaccttggccccagctccgcaagggaatcccccaggtgtctggccgcatctctctgagcacccaggagtctgggcccaggggccagtgagcagggccactggcctacagacagtacctgcaggacagccacctgcccctacagttgccctggccttggggcccccaggatgcccctccccagtcacagccattcctccaaccctcagagcgcctgcgcctggccgatggcccccatgggtgcgctggccgcctggaggtctggcatggcgggcgctggggcaccgtgtgtgatgacggctgggacctgcgcgatgccgccgtggcctgccggcagctgggctgcggaggggcactggccgccccgggaggcgccttcttcggggagggggcagggcctgtgtggctcagcgagctggcttgccggggcaacgaggggcagctgggcctctgccaccaccggggctggaaggcccacatctgctcccacgaggaggacgcgggcgtcgtctgcgcaggtgaggacaccctggctgctccttcagggggagctcctttggagatgacccaggaaccccaagtccttagccccagcaagtctgagtgttcagcagttcagagacacccaacctcccatcccctccaaagccaggtggctaactccctcttccagggacccaaatggcctggattcccctcctctcctcatagcttctgtccctgcccccccgccgcaggtcagcgtgtggctaactccagggacgactcaacatctcccctggatggggctccctggccagggctgttgctggagctgagccccagcacggaggagcccctggtgacacatggtgagcccaggggactgccctgccaacccccacccagcgtgccctcctgccccccccgaggggagagggactgccctgccaacccccacccagcgtgccctcctgcccccaccgaggggagagggacctctgcagtatgaactcccaggggacacacagcccgccccctgccccgccccgtctccttcatagcctagggagtcctccatcacttcagaccctcagagacggaggcctgggcccccaggtgggaggaaggatgaggggctcagctcctgacccctggctgtctccactcccagccccccgcccagctgggaacccccagaacgcctcccggaagaagagcccccggcccaagcaggccaagtccacccgggcccctctgctgacgacaggagccccccgccaaggtaagctccctgcaggctcccccgaccccaaggctggttgctgtgaggcccagggcccagaaaaactgaggacctgcgggcgccctctccttagccggggccctggagggatcccagtgttccccgcgtccctcccccggggatttagacggccaggcctggtctcccctcttcttcctgccctgtcaggaggcccaggtgtcctggcccgctcaggtcgtggactcacctcttcacgggctgccggcggacagatctcaggccaccgctccctcaggcctgtttccccaggtggaaatcgaggaaggggtgtttgaatcatttctcactggccacaccgtcccctccctgctcaccccacagagcggctgcgcctggtctctggcccccacaggtgcgccggacgcctggaggtctggcacggcgggcgctggggcaccgtatgtgacgatggctgggacctgcgcgacgctgctgtagcctgccgggaactgggctgtgggggggcgctggctgcccccggcggtgccagattcgggcctggtgcagggcccgtgtggatggacgatgtggggtgtggaggaggagaacaggccctccgagactgcccccgaagcccctggggccggagcaactgtgaccacagcgaggatgcggggctggtctgcaccggtacgtcgggctggggcctggccccctcctgtcttcctcagaccccagctccctcttgcccctccaggaagctgcagcgggcctgctcccagctctgcctcctgcccgcctgctctctgcatgcccagcgcccactcaccacgctctccagcccctccttccacagctcctgccgttctccttgccaggaatgggaggagcaggcttgaggcttgggctagtgctcagccctgtcccggggcctaggccagtgaccgtttgtttaagcctcagttttcctgaaggagcgatggagctaagaatgcctgcctcaggcttgagccaagtcctggaacgcaagaagccctgcctgccctctgccaccgggctggccatggcaggggaccgtctcggagacctcttgtctctgtggccaacctctgctccttccccatcctcaagggagctggtgggaaggagggagggagggcggtgacttgggggcatggagggagactgaggcagggtggggacacccacgggtgagcctccatctcccctcattcacgccccctcagcgcggggtctcctcccctcatgtctcccagggggtccctcccctctcctgtaccccttggacctgggatagaacccagcaaacagcggttggggggtgttaggtgagagctcaggggctccctccctccttctctccttccttccttcctccctctttccctttctctttcctttctttccttccacaaatctttacacaccaccacggcaggccccaccctgctggactgcccgatccattgactgtaggaggccggcaggcagagggcacccacctggcatttcatcagcgttggggtggggacagtacacgggctgcaggcaaagctgggtgcctgcccaggatgggtaggaaatgctgacatcagtgggtatccaggggggagagaagagagaaagaggctgaccctagtctctgctgtatgctgggccctgcgctgtgcacgttacctggggccgctctgagcctcccgcagcccggacggggtggatcctcatccctctcttcacagatgtggggccgaggctcagagaggtgacgtaaatggcccaagacccaggtgcctagcaagctccagccccagccgctgacccctctgggtctgtatagacccacgctccatgcctgtcccactgcacagtcggccatagggacgtggtggggacacggaggtcagagtgggagtgagcagcagagaaggcttgtatggggtgggggtggtgccttcgtgtgcctagtgtacaagctgtgggggaagaagtgggaccttcggagcagagttcattggagggaagttgaggctctggagaggagagggtgaaggtgccaagaaaggaaacaaatgaactaaggcgcccggtgaagctgggagcttcgccagcatctgatttaattctcatggcaaccccgggagggagacgctcccctcccctgtctgcagatgaggaaaagcagacaggtgtgttagactcctccctagttctgtgctcttctctagaacagtgattgggggcaattctgcacctgcctcgttgggggacagagagagggactccagagtcctccaatgatgagtcaactcttaccccaacagaaatgtacccgaagagccaggcatggttacaggctaacacctgtagcccacgtgctttgggaggatttcttgaggccaggagttcaagaccagtctgggcaacatagtgagaccctttccctacaaaatataaaataaaaaaaaaatagcagggcatggtggcgcatgcctgtagtcccagctacttgggagaggctgaggcggggaggattccttgggtccaggaggtcgagactgcagtgagccaagattgcaccattgcactccagcctgggtgacatagtgagatcccctccccccaaaaataaaaaaatgaaatgtaccctatgtatcctaaggccagcgagaggttaatatctagactagtggctctcagctggcaagggagtgagggctttctcatccccttcctccccaaaggacatcaggcaatgtctggagacgtttttggttgtcgcagctagggggaggggttgccactggcatgtggtgggtagaggatgcagtgcaggacagttgccacgataaaggaggatgcccaatgccagtggtgctgagacttggaaatccggctctctaggatccgaggggccaggcatgggaggtggatccaggggaccagagccagagctcccagcgtccccagcccccaccgccccaaggcaagggatatgggggatgcgccagagttggactccgggccagtgacttcctgtcttggaaccttttcctcatttggatagtgaagatggaatatttgcttcccagagtcatcttggggttgcagcctgcctgagcatagcttagtccccgctcatccaccctcgtttcctggccctgtgctccctctcccactatccaggcccagcacctcggctgcgcctggccgatggcccccacgggtgcgccggccgcctggaggtctggcacgggggtcgctgggggtcggtgtgtgacgacgcctgggacctgcgagacgccgctgtggcctgccgagagctgggctgcggaggggcgctggccgcccccgggggcgccttctttggggaggggtctggacccatcatcctggacgaccttcggtgtcggggaaacgagacggccttacgattctgcccagctcggccctggggccagcatgactgtcaccaccgcgaggacgccggggccgtgtgtgacggtgagggggttgtggtggaggaccgggaggtgggcgtggtggtgcttggagcggaggggcaagttcggcgggggcgggggggtccctacgcgcccttcctgccctctctccggactttccactcccccatcttattcccctctgaatcctcaccctgcgtcactggttctcagctgggggtggctttgcccccaaggggacattggacagtgtttggaaacatttttgatggtcacagctgggggtgggggtgctcctggcacccaggggttagaggccaggggtgttgcttaggatcctgcagtgcacaggccgcctccacagctgagaacagtccagccccaaatggaaacagaggcgaggatgagcctcagccccgtggcagccctggctggccctgcctcctggcccccggcggaagccagccttctcctctgcataaggtcaccccccgcttctctgccacccctaagctaccatgccctctgctctctctgttcccgtgctccgcattcacacccctctccccaggtcagggatgtggaaagcgtgggctgtgtctagggaggaggttcggcaggaagagatctctgcgtgcagctgagaggactgaggaaggatgacgcaggaggtgggggtgccggctccgggatggagggtgtgtgtgggtggcaatcacttaccccctgctccacaggcatgcccctgggctacgtccctcccacggcccccacggacagcaacaactccacgcccagggaggctgcctccaggcccccgtccaccatgacgagccaggctccagggacggcaggcgtttcacctcctccagcctcccctactgtcctttgggagcctggaccggaagccggtgagtccctccatgctccccaagaaaacagggtccttccttctgtttccttccctcagctctgagactgtctcatggggggcctcttgcaaagagaaaggtggagaagaggagcacaggggcctcgcccaggacactgagctgggttcaatgctctgctgttgcgtctgggagcgtgtgataattcttgaacaaggggtcctaactttcgtcatttaccaagcccccaaaattctgtagccagtcctggataagagaaaggatgctgggctgagagtctgctctattcccaagctgcacggtgtggctgtaggatccatcatggggtactcaggccagcttcaaggaacagccctgctcaaacattacctttactttccagagtctctggttctttagcaaatgtgatcaatggttctgcctgcctcctttcatatatatatatatatatttttttttttttttttttttttttttgagagtggatttaattctgtcactcaggctggaatgcagtggtgtgatcatggctcactgaagcctcaacctctcaacctgcaggctcaagtgatcctcccacctcagcttcccaagtagctgggactactaattttttgtattttttttttttgcagagatggggtttgccatgttgcctaggctggtcttgaactcctgatcccaaaccatctgcctgcctcggcctcccaaagtgctgggattagaggcgtgagccaccgtgcctggtctctttcatgagtattgaaaggactgttgttttaaaatataggtgttattattactgaggtatggtgaggccaggatctcaggagatgacagccactaaaaagattgtgactgacggttctcaagaggatggcgtgccacacggggccacacagggaagcaccagggccaggcaggaggtagacggagtgagggggaagcatggcaggaatcttttatacatttatttagagacagggtctcacttggttgcccaggctggagtgcagtggtgtaatcacagctccctgcagtctcaaactgctgggctcaagtgatcctcccacctccgcctcctgggtaacacagctgcatgccaccgagcctggctattttttttttttttttttttttgtagagacagggcctcactattgtccaggttggtctcaaactcctggccttaggtgatcctcctgtcttggcctccctaagtgctgggattataggcgtgagccacccggccaggtgcaggggtctttcttgtgttttttgcaggaaggaataggtgagacaggttgagcaggcttagaactggctggtttgaagaatttcagtggggccggtggggagggtggcgactcagagggttgtccttagtcatctggtacttggccctggggcaatgaggacaggtgcagaatggcccagggtgtgagagcccagtggagagggtggtttgcacacgaaaggcatgctcaagccatttaccatctctaggaattagctaaccctgggaggggcagtccctcaggatcaggaatgctccaagatgtcaaagcatcagaaatacagaaaataaaaaggcgtggttaacacagctgtctcctcaagatgggaaaaggccgaacaaaagcagcaacttattttcaccatgatcaccattcccagaggtctcgttccccttttcctgaataataatatcagctaacactgaacgagcatgcactggctcctggtgactgatgctgttcccagttctctccgtgtctcagtccaggtgatgcttacagccactgtggtgtggatactgataggtctccatgttacagatgaggcagcaccgctgagaaatgggagagccaggattcaagcaaaaacacttgttccagggcgcacgttctttaaaaaacaattgtgataaaacatacatgacataaagtttaccatttttaccagtctttttttttttttttttttaaacagggtctcgctctgtcacccaggctggagtgcagtggcacgatcttggctcactgcaacctccgcctcccggttcaagcgattctcctgcctcagcctccggagtagctgggattacaggctgagccactgcacctggcccatgcctggctaatttttgtatttttagtagagacagagtttctccacgttggccaggctggtctcaaactcctgacctcaggtgatctgcccgcctgggcctcccacagtgctggaattaacaggtgggagccaccgtgccgggcctgctgctccctgtcttttaaaggacttcctctgagaagccttctccagcttcctcaggcagaatttttctcaccttctcctcgttgtgtgtctgccttgccctttgggtacttccactactccctttagctcgctgagctgtaatgaagtgtgtgcatgctactttccctgaagaccgagagcttttcaaagcagaggctgtgcctgactcataaacaacaacaaaacaccttattatccctggtggtctagtggttaggaaaataaaatctaagaaagaagaaaaaaacccttattaaaccaataataatgagagaaaattaagggtggtgaacaactgcatggaaaaagacttattttaattgaggtgacattcatgtaacataaagttaaccagtttaagtatacaacttaagtggtatttatacattcaaaatgctgtacaaccactactatttggctactgtgaatggtgctgctatgaacattcacatactggtatctgtgtgaatacctgttttcagtttattctgggtatatccctagtagcagactttctagattatatggtaatttgatgtgtagctttttgaggatcctccaaactctgcctgactcattatccctcatgcctaatgcagaaaatggcacaaaaaaggcctcatgaaatacttgctgcctggaggaaaggatggatgaatggagggaaggcctagatggatgagtggaaaggaagatggggggagggaaaggtggatgaagagtcaggaggctgggcggcttccccgactctaattctttgggtctcttctaccccagggtccccccagctgcgcctggtggctgggcccagcaagtgctcaggtcgactggaggtgtggcatgaccagcgctgggggaccgtgtgtgacgatagctgggacatgcgggattcagctgtggtctgccgggagctgggctgtggtggacctcagcagccagaccctgctgctggccgctttggctggggtgcgggccccatctggctagatgatgtgggctgtgtggggaccgaggcttcactgtccgactgccctgctgctccctggggaaagcacaactgcgctcacaatgaggatgttggggtcacctgcactggtaaggaggccctagctatctgttgactccaggagggcttcctggaggggaacagtaactaacatgggcactaacattgattgagtgcttcctaagccccagccctgtgctgggtgtttttgcacatataaccacattgaaatcacataataagtctagggtggtgtgtgttatgcccattttactgataaagaagctgaggcacagagaggttgggtaacttgctcaagatcacacagcaacaactaactggcagatctgggattcccactcagagaagcttctgcttcctcttccttccaggaatcaaggaaatttcccactaagaaaggagctttagctttcctacgatgaaaggaagcaggcagggcactgggagatggaaagaagccaaagtgagagccagttaacataaactcaggcaatgcctgttattaaattgcagaggctgagccaggtgcagggtcctcatgctgggctcatgaatggaatgaacatggtcttggtctttgaatagctcacagctcatgtagagaaatactctaacaaatcattgcaaacctgtgtgactcgttatagtttgaggttaccaagaccactgtcagactcaataatttgctagaagaactcttagaatcaaagaatctgttacactcagcgttatcgtttatcacagtgaaaggatacagattaaaatcagccaagggaagaggcgcctgaggcagggctcaggagacagtaggtgtgagcttccaactgtcctgtcccagtggagttatgcagacagcacttcattatcccagcaacgaagtgggacaacacacatgaggaactgccaactagggaagttcccccaagccttggcatccagagtgttcgtggggacttggccacgtacatgtggctgaccataaatcacactgttagcataggcgatctggcatggcccaagtgccccagggaaaaaaatctcttatcaggcaaggtgttccaaaggcttcgaagtcatctcccaggagccggggaaaaggcgaaacctttctttgggcagggttaatcctttactgcacacgtgtgctaatcagaaagatggaagatggagagtggtgtctcaaaggatggaggcatcacctctgctggaagctacggctcttccctctgtccccgtcttcctgagggccacgggggcaccacagaaggattctgagttcgggagtggcctgtcggacctgggtaccccactggtggtcagtaagaattgacagggaggtagggagacctgtcagaaggtataggaaatgaggccctgactcagagcagaagctgaggagatggagaggagaggtcaggtgtgaaagggtgagggggtcagttatgtccagattgtaaatgccaagaaggcgggggcagtgtcgggtttggcttgccataggctacccgagggtctaatatggtgtgtggctcataggaggtgctcaataaatatttgtgacaataaatgaatgaatgatgaatgaatgggaactgggtgagtgactggagagaaggaggggcctgggtagatgatcttgtcatcatggtgtctctgtcttctcttcctgccccactcaccttccagggcccccaggcctggactccatctcagaccccttcagctggagctggattcctggactggggagagatcgggatgcctggctcccgggagagctggccaccaagccctctgcaagtgtgactgccagtgttctggagaaaacaaccacgaaggccccagggaaaatgcctaagagtactaagaagtgggtgacaaaaaatgcaaagagaccaaccactcaacccccagtgatgccaaccacgaaacactccagggcccaaagccccccagacctaacctcacagaccactgcagcactgaccactgaggcctcccgaagacctacctctgagtttaccagaaggccgaccacggaggccccccagagatggacctctcacaccactgccacgctgacccctcaggccccccgagaacggaccactaagaccatggcaatgctgaccactcaaggcccccaagaaatgacctctgagtccactatcaagagtatccctcaggcctccctggagccatctgctgagatcccagaagggtctccagagtcacccaaagacccggccccctctcccagtgttagcaccactggggaatcaggtgagtggccgtgaggggtgtggggagagaatgggagaggctgaccctccctcctgacctaagggccttccacgcaggcctgttccgggttcgtctggccgatgggcccaaccgctgtgctggccggctggaagtgtggcatgccggacgctggggaacagtgtgtgatgacaactgggacctgcgggacgccactgtggcctgctgggaactgggctgtggaaaggtccggcctcgagtaggcaaaacccattacggccctgggactgggcccatctggctggatgacatgggctgtaagggaagcgaggcctcactgagcgactgcccctcgggggcttgggggaagcacaactgtgaccacgaggaagacgtggggctcacctgcactggtaccagggcatggcggcggtggtggggttgtcgggggtggccaggagaatggagtcagggtggggccaggtgacggcaccatggtcgactctaaagaactgggtatgaggggtcggggtggggagatcccagagttgctccagaagattccaaaaggggagggaagagcagcagcaaggacctctgagaaagaggatggggtcaaccattaccccaatttctccaaaggctacacagactatgacgattatcccccctggacctgggaccccacctcaagagaggacctggccaaggggactaccacagcgggggtacctggacacactctcccctggaggaccacccggcgcccgggtagctcctccccagcaataaggcgcctgccggacacaggtgagaggcctgattggggtggccatggagggcctccataaacctccattcgcttccctgcagggtttccagaaagacccttctcaatgagctggctgaggcctcggggcaccctggaaaggttttccttggctcctgagaccctaaacgcattacctccttgggctcaatggtgacacttcttcagagccaaggacaccatctaagagatcaggctaagctcagcaatcctgagcccatggccctcctgtaagccacacaatatgcaagcctggggccctcagtcaaacccacaaccaagggccattctgtcatcacatcatcgtccccaccccagctcccccagagcaagcgaaacctcacccattcttgaagctcacgctctggtccgggcctggtatggctcagaggtggggactcctggagtgcagcttctctccttaccctggccatcccctccctctggccagcagaatcagcctccagggccacagctccatccccctctgctctatggcctctgtcttgctgctgcagctccttccacacctgggaccacgccccgctttggcccccacatcactgtcaccacattcttctgcctttttctttgcctgtcttccttgtatccccatctctcaggatccctgcgaatccatctctgctcctgtttctcacttgctgttggtctctttttttcattatccatttctcaccctcatcatctctatctctgtattgcccaggatggagtgcagtggtgtgatctcagctcactgcagccttgactgcccgggcccaagcgatcctcctgcctcagcttcctgaaaaggtgggactacagatgtgcgccaccacacccggctcatttttaatttttgtagagacgggctcactatgttgcccaggctggtctcaaactcctgagctcaggcgatcctcctgtctcactctctcaaagtgctgggcttatgtctgggtttataagtgtgagccaccatgcctggcctcacttcattttccatgatcaaattctctatcttttcttctctgtgccaatctctttttgcctttcattttcaatttctcacactcgtctttatgccgtatttttttcatggtaatttcttttgctctctctcaccatctttctcattttttttctttcgttgtcagtttcatattcccatcatttctttttccctgtctttctttttcaatttctcaccctcattacatctatttctcactccagttttcgtggtcagtttctctttatttttttctcccttgtccttctgtctttttgtttcattatcagtctcacactctcatctctgtttctcacctagtttttcctggtcaatttatctgtctttccccctcagtctttcacttttctttcagatctcaccttcaccacctctgtttctcactccatttttcatggtaaatttctctctctcttttttgagacaggatcttgctctgttgcccaggctgaagtgcagtggtgcgatctcagttcactgcagccttgaactcccaggctcaggtgatcctccgacctcagcctcctgaatagctgggattacagatgcacaccaccatgcctggctaatttttttttttgagacagagtcttgctgtgttgcccaggctggagtgcagtggcgtggtctcggctcactgcaacctccacctcccgggttcaagtgattctcctgcctcagcctcctgaatagctgggattacaggcgtgtgccaccactcccggctaatttttgtatttttagtagagacgggtt[132 bp omitted]tgttgcccaggctggtctcaaactcttgggctcaagtcatcggcttgctgcggcctcccaaagtgctggaattgcaggcgggagccactgggcccaaactgtttctgtatcttccgtcctcttgtctttcactttcagttctcagcttcgccacctgcttctcactcgatttttcacggtcggttttgctatatcacctcatactctcatcgtctccatttctcactgcgttctctccccaggcccagcgctgtggtatcttttcctttgtctcttacggttgttttctgagtctccatctcccgcgccttccctgcagtctcccgcgtgctctcttctctctccccctcgtttctctcatggtcagcccccttccctccgtttctgtctcccgcgggctcctctgtccgtttctcaccgtccccgccgccctcgccgctccctcacgggaggtttcactccccacctaaggggcagcgtttctgtcctccctctgtgcccgtcgcagtcgctgtttctccgtcttctccctcccttccactctcccgccctgctcgccgtctggggctgcctgggtttctgcctctgtcgccccgcgccccgtacctgtgccctcctgagaggcccaagcctcccgctcccgcaggagagtctcgccgcaagcgtcctttcccgccttttttttttctggcgctcagcacgcatgcgcaggcgcggtgggcccgggaatggagggacgggatggggcaggcgttcatctgcctcgcacctcgtgacgtcacaggcgcgctgcgcctcctgattggccagccggcgcatcgcccgcagtaataatagctgggcgaagggcaaccaggccccaagaagcgggccttgaggtggggaaagggagggaggaagcaggccctagaggcgccgtgacttgggggtgggtgggctccagctgtgagttagagctatcattccgtttccagagccggaagcgggagctccgagaggtgatgctcctcgttcaaggactgccagggttgcagcgcctccctagcccatagcgccccctcgtggtggaggcgggcacgtgccgggcacagcggctgcggagacagcgggtccggcctcgggacccctcccgtagggtagggaggcagccaatgagcagaaataaatgcagaatcacaaactgcgccggtgaaatgaaaagacagccatgtgtgccaccttatcaataggaagacttggaggcgtatgcggggtggagtgggagacgaggcaggcatgcattcttagcttcaggagcaatgtaaccttgaaaaagtgacttggtctctttgagtccccgtttcttatttatattgttttatttatttattatttattgagacggagtctcgctctgtcacccacgctggagtgcagtggcgctatctcagctcactgcaacctctgcctcccaggtttaaacgattctcctgctgc[134 bp omitted]ctcccgaagtgctgagattacaggtgtgagccaccgcgcccggccacctgtttctttctctggaaaaaaaatggggcgccagggttgttggaaaggtggaacgagagctcacctagtctgtgctgggcatgcatgaccccaacttcaggccatagaaactgttgctacacctgtgtttcagatggggtaaaaagtgaggctcagagaagtttaacttaggagccacgattataacctgttttaagtgatttcacacgttttgctccttggattgggaaccatatgctaaaatagaagcacgagtctggagtccgactctcctaccaggttccaatcgtggttccaacccggattagaactagttgggtgactgcaggccccaattcaatgaacaaaatgtgtgtgaaatcgtttaaaaccgcagaatattgtttgttagggttatttgctgaaaacgaacaacagctgcaggatttcagggaacgagcgattatttgtagtagagaaatcaaggaaacctcacaggggagatgatattatttcatcagcaggccacaaggagaaatgaattctcagagaagcaaagggtgggagaaatttgcattgccagaaattttcatcggtgttatccatctctgctagactttaagctctgtgaaagatctgtatctatttcaattgctgccataatacatcgccacaaatttagtggtttaaaacaacgcagacttattattttgcagttttgtaggtcagaagtcagacttgcttagtgggctaagatcaaggcgccagcagggtggttccctttggaaggctctaggggagaatccatttccctgccttttccagcttctagaggccacctacattccttggcttgtggctccatcccccatcatcaaagccagcaacattgcatctctctgacctttcctctgccttcgtatttttctctctcactgtggcttgaaaggttctctgattttatttatttatttatgagacagagtctcactctgtcgcccaggctggagtgcagtggtatgatctcggctcactgcagcctctgctgcccaggttcaagcaattcttatgcctcagcctcctgagtagctgggattacaggcgtgtgccaccactcccggctaatttttgtatttttagtagagatggggtttcaccatgttggccaggctggtcttgaactcctgacctcaggtgatccacccgccttggtcacccaaagtggtgggattacaggcgtgagccacggcacccagccagttctctgagtttaaggacttagattggggccacttggctaatcaggataatttctccatttcaaggtctggacccttaattacatccacaagtccccttttgccacgtaaagtaacatattcacagtttctgtggattggggcacacacatctttgggcgaggggcatattatcttgtctatcatggatctatctggaatccctagtgtctagggcagtgcttgaaactcagtagttaatttttatgttatttgttaaatgaatgaacaaatgagagatgacattgtaagtctaagagacactggagatgagattggaggcctgtggaat[138 bp omitted]gcctc[224 bp omitted]ggatgatggagtttggagatacaaacgtcagttcatgtgtcaaatgcctactgtgtgacagagcatgtactaactactgggaggtagtgttagggagcaaagcaggggaaggggcaggggagactgagggttgcagtttaaaataggatggccaggtgtggtggctcatgtctgtaatcccagcacttagggaggctgaggcagagggatcgcttgaacccaggagttcaagaccagcctggccaacatggcgaaaccctgtctctactaaaaatacaaaaaaattagcctggtgtggcggtgcatgcctataatcccagctcctcgggaggctgaggcaggagaatcgcttgaacctgggaggcggaggccacagcgagccaagattgtgccactgtactccagcctgggtgacagagactgtctcgaaaaaaataaataaataaaaataaaataaaaaattcaccaagcaggggcgtgctcctgtagttccagctacccgggaggttgaggcagaagaatcacttgggccctggaggttgaggctgtagtaagccatggtcaagccactgcactgcagcctggatgagtgagaccccgtctcaaaaaaaaaaaaaaaaaaaaaaaggatggttaagagacattttacgggccgggcgcggtgcctcactctagtcccagcactttggcaggctgaggcaggtggatcacctgaggtcaggagttccagaccagcctggccaacatggtgaaatcccgtctctactaaaaatgcaaacaattagccgggtgtggtggtgcatgcctataatcccagctactcgggaggctgaggcaggagaatcctttaaacccaggaggcggaggttgcagtgagccgagatcccgccactgcactccagcctgggtgacagagcgagactccgtctcaaaaaaaaaaaaaaaaaaaaaaagaaaaaaagagacatcttactaagaaggtgccatttaagtgagaaggccctgaggccctgaggtgggtgcatgctctgctggttcaagaaatagcaacaaggtggatgggactagagcggagtgttgggtggaaacggtggcagcgggggagatggggaatggactgtaggggccagcgtggatgcagggagcccgggaggtccaggggagagtgacaatggctctgatcagggtggcagtggagaccaagggagatgtggatgtattcaagccatattctggggtttgagctgatggagctgagtgatgggttggggacagtgaggagagggaggcagggaacgggtaccttttaccaggtcggggagctctgtgaggtgggggcacagcagccagagtggggatatcaggagatattagctgtgcatcctggaggtccagggagcgcctgggctgaggatataacttagcgagatggaatttgaagctgtgggagtggatgtgactgcacagatagacagctgtgtctaatgtagttcccgccactgccagctgggaagccggggagacccgtgcttggggtatcgccggaggtttatcaccctatgaggtcatgcagggagaagaggatccaggactaaatatgagattaactttagaggttggatgatgatgaggataatggtagctgctattttatcgcgtgctctccatgggccaggcgctgttcaaagtgcatcctgtggttacactcccttcctccccatgcagccttgtgaggtgagtcctatccttagcttgattttacagataaggaaactgaggtagggagaggtcaggattgcaaaaggctgaacttggattcagactccagattccacacccttgctggctctagccttggagagtgggaaggacagaattaggtctgtagaatccagggcgcatgcagcagggatggcctcatccacaggggatggggggaggcctcctgagggcatggcctgtggactaactcctatacagcagggatggcctcatccacaggggatggggggaggcctcctgagggcatggcctgtggactaactcctatacagcagggatggcctcatccacaggggatgggggaggcctcctgagggcatggcctgtggactaactcctatacagcagggatggcctcatccacaggggatggggggaggcctcctgagggcatggcctgtggactaactcctatacagcagggatggcctcatccacaggggatgggggaggcctcctgagggcatggcctgtggactaactcctaaaggatgaataaaggcttgccagggaaggaaggggtgagacttgggagatatgtacccagagggaaagagaaccatttagaaccaggtagatctgctggggtctggagctggatgctgtcccttagctgtgttaccccaagaaagtttcttgccctctctgggcatcagtttggccatctttgtgaatcagcagcctccccagccaccctctccccataagaccagcaaaaatgacaccgtctggcagcatgaaggctgtaggataaaggtgtgagtgaggatccccatgcacttagtggggcaggttcgcagtatctaaggagatacatctgcttccatacagcaattccacaacgaggcgtcgagaaattctcgcccatgagcctaaggacatgggcacaaagagttcactgaagccatatttgtgacagcaaaacactgggagtaaccgaaatgcccatcaacaggagcatagattaatacccagctgtatatccatgcaatcgagtagtacgtagaggttcacagaatgagccagagttatgtgtatctttttattcttttttttttttccaagacggagtctcacgcctgtaatcccagcactttgagaggctgaggcaggcagatcacctgaagccaggagttcgagaccagcctggccaacatggttaaacactgtctctacttaaaatacaaaaaaattagctgggcatggtggcaggcgcctgtaatcccagctactagggaggccaaggcaggagaatggcttgaaactgggaggc[132 bp omitted]agatttccgacagtgcattctgagagtacacaggaggctgccattttaaaaggaagacggcttcaatttgtgttcttttttttttgtttttttgtgacagggtcttgctctgtcacccaggctggggtgcagtggcatgatcacagctcactgcaacctccgcctccaaggctcaagtgattctcatgcctcagccccccagttaactgggactactggtgtgccccaccacacctggctaatttttgtaatttttagtagagacggggtttcaacat[135 bp omitted]catcttgaaaatacatctttttggtttttttagatggaattttgctcttgttgcccaggcttgagtgcagtgacatgatcttggctcactgcaacttccgcctcccaggttcaagtgattttcctgcctcagcttcctgagtagctgggattacaggcatgttccaccacgcctggctaatttttgtatttttagtagagatggggtttcaccatgttggtcaggctagtctcaaactcctgacctcgtgatccgcccacctcagcctcctaaaatgctgggattacaggcgtgagccaccatgcccagctgaaaatatatctttagtgattcactgctaatgggtttttttccctggactattttttcttttttcttttttaattaatagtaccactaatggtggtgtttttgtttttgtttcttggtttgcttttatgtttgtttgcttgtttgtttttgagaaggagtctcactctatggtccaggctggagtacagtggtgtgagctcagctcactgcaacctctccttcatgggttcaggcgattctcccgcctcagcctcctgagtagctgggattacaggtgcccgccaccatgcccagctaatttttgtatttttcgtagagacagggtttcaccatgttggcc[131 bp omitted]atatctggtaggattttatagctacccttttaaggtgtctaatagaaatggaaaggtatttgattaagaatggttaataatacgaaggcatgacggaggtgtctgctgtgcctggcatcagggtgaaatttgacccttgttctatcagcgtgcagtgtcttagcaggtaacggagcaagggatttctgtaattgggaccactagccacagagcttaaggcgacatcggtcaacttgcccaaggtcttggacactgcccttctgcctggttttgcgtttggaatgagaaaacatcctaacgggctcagttgggtaggaaatgaagaggaagggaattcggggtgggggcggcagcgtgggcagaggctgggaggtgtgaaaagcctgcgcgttgtggttgttcccagtgttttgctgtcacaaatatggctgctatgaactccttgtacccatgaatccctgggctcatgggtaaggatttctcagcacctccttgtggaattgcttgtggaagcaggcatgtctccctaaacactgcaaacctgccctcctaactcaaggtcagggtccagcgtgagcagagcatcgtgtaggacgagacgatgctggagaagctggcaggggctggttatgaaggaagatggtgtctgtgggccgtggggactcatggaagggtttagggtggaaaggggcaggtgtctgccagtttttaagaggcctccaggatcagtgtggggggccagggtctcaggggaagttggtttgatgattcggataggcaatgagtatggagtgttttgttcgggtgatgaaagtgttctcaattttgattgtggcgatggtcacgcaagcttgtgagtgggtaaaccccctcagttgcaatttcaagctgatgaattgcatgatacgtgacctgtatctcaaggaagctgttgttgaggccgggcacggtggctcacacctgtagctcactttgggaggctgaggcaggagaatcacttgaccccgggaggcagagcttgcagtgagccgatattgcgccactgtactccatcctgggtggcagagtgagacttggtctcaaaaaaaaaaaaaaagaaaagaaaagaaagctgttgtttgtataaagctaggactgaattatcattctattctccctaaataaaatggcatacatatatgtatatatattatacatttatatgttatataaaattgctattatatagagattaagtgcatttggccaaaaaaaaaaaaaaggaaaaatagtattatagagatgttccaggcagtgaattaataaagatgttatggtttttcccccgctagggcaggagccttgaggaattaaaataataaattcctttttttttttttttgaggcggtgtctcgctctgtcacccaggcaggagtgcagtggcacagtcttggctcactgcaacctctgtctcccaggttcaagtgattctcctgtctcagcctcccgagtagctgggattataggcgtgtgccaccatacccagctaattttttgtatatttagtgcagatggggtttctccatgttggccaggctggtcttgagctcctgacctcaagtgatctgcctgcctcagcctcccaaagtgctgggattacaagcttgagccacggcgccaggcccaaatgcccttcattttatgtgctagtttagtgaccgtttccgtcgttggtagccaaaaacatcccagctgaatggagaaggtctccacgaggtcaggtagggctgcagtggcggtgcagttgagacgggatgatgcctgaactggggctggcccaggaggagagagacggggagtcaaactcaaagggaagttggaagactcaatcctcttccccatatctctctaggcagcaaagatggttacaagcttccctggacgtgggacacaccatcaggaaggggcctggctgaggggacccctaccgcaggcaaactaggaccaactcttggggctggcaccaccaggagcccaggcagtcctccaactctgagagtccatggagacacaggtgagacacgtggctggggtgaggagactgggacggtatttgtcctggggtaaagagacagattccagactccccactggaacccttaccccagaaagactcagcagaaatataccctaaaacaaagggttatcggctgagcatggtggctcatgcctgtaatcacagcactttgggaggccgagttgggaggattgcttaagctcgggagtttgagagcagcctgggcaacatggtgagccccccaagatatgaacattagctgggtgtggtggtacgcacgtgtggtcccagctgcttgggaggctgaggcaggaggatcccttgagcctgggtgctcgaggctgtggttgtgccactgtattccagcctgggtgccagagcgagaccttgtctcaaataaagacaaaaacagaaccaagaggttattatctagaccgctggtcatcaactagggtcgattttgcccccaaggggaatttggcaatatctgaagatattttggattgtcatggcaggaagtgagaggctacccattggcacctgatcggtagaggccggggtggtgataaacattcacaatgcacacgacattccccataacaaagaaccacccagccctaaattacaatagtaccgaggttgagaaaccccagcctagatggcataagtcactgtgacaaataggaaaatgataggaaaccctagatgagaaagaggaaaacaggtgattcccagaaaaggaagcccaaatggctgagtgtatttagaaatgcccacgctcatcaggaaccagaaaatacaaattaaaacaatggcaagtacagaggagaatgagaaaggtgggtattatccagtgtgagtgaggatgtgggaagacaggcaaccccactggacagagctgtttgataaagacaatccagcagtatttagtaaagttaagcatgattaggctggct[137 bp omitted]gtggtaggcacctatggtcccagctactcgggaggctgaggcaggagaatggcgtgaacccaggaggcagagcttgcagtgagccgagattgcgccactgcactccagcctgggcaacagagtgagactctgtctcaaaataataataataataataataataataataataataataataataataataggtgtggtggcaggcgcctgtaatcccagctactcgggaggctgaggcaggagaactgcttgaacctgggaggcggaggttgcagtgagctgagatcgcaccactgcactccagcctgggcaacagagaaagactctgttaaaaaaaaaaaaaaaagagagagagagaagaagggaggaagggagaaaggagggaaggaaatctgcatgagctccatgacgtagatctataattttgcccatttctcagatgagtgaaattgaggcacagacatcagtgactctgacatcaataattattagagtgcttattccatgctagacattacactaagtgctttgcacaaccatggtctccctgagtccttttgacagctctgcaagggagatacgcggatcatccacagtctatagctgaggaagaaactgagattcaagcagtgaagtaacttggccgtggtcaccccgctaggaagccatgcagctggggtttaaactcggacagcctgccttgagcacaagccctttacttaaccgcttctccaatcctgcaaacaaaggacaaggtggggaagggatgcgcctgaaagaccctgccctgcaggaacaagtggaaatctgtagatctgtgtggttcaatacggtagctaagagcaccgggcatggtggctcacgcctgaaattccagcactttgggaggctgaggcaggcagatcacctgaggtcgggggttcaagactagcctgaacaacatagtgaaaccccatctctactaaaaatacaaaaaaattagctgggcatggtggcacatgcctgtcatcccagctactcaggaagtggacacaggagaatcacttgaacccaggaggcggagattgcagcgagccaagatcgcgccactgcactccagcctgggcaacaggagtgaaactccgtctcaaaaaaaaaaaaaaaaaaaaa[133 bp omitted]tgaaaccccatctctactaaaaatacaaaaaattagcaggacatggtggcgagcgcctgtagtcccagcttctcgggaggctgaggcaggagaatggcatgaacctgggaggcaaagctggcagtgaggcgagatcgtgccactgcactctaacctgggcgacagagtgagactccgtctcaaaaaaaaaaataaaataaaataaaagaaaatgaaacatttagtttctcattcacactggccgcatttcaagggcttggtagccacatgtggccagtggctactgtattggcacggtagatcacagcgcattcccatcactgcagatgtgagatttcattgcctagactctatgtgcaaacaacttgggttcaagtcttagccctgcaacttgcaaactatgtctgtgtgaccttgggcgagtcacctgccctcttgccctaatttcccccttctgtaaaatggggataaaattggcactcacttggaagacagccccagaagagggtcaggctcctcctgctactcaggcccaaaatttaagggggtgcccaaaacgccaaaatcaagatacataatatcataatacagtattttttaaaatgaaaattaatgccaaaaaaaaaaaaacccatgatgaactcggtatcaaaaatgtaactgaaggccggg[175 bp omitted]gaggc[138 bp omitted]gctgggctccccctaatcctggccctgttggatcccgtctttggttaaaatgttaactttggttaactgtggatcttttggattaattttgattgtttaaaaatattgcataaaaacgcttgagcccaggagttcgaggttacagtgagctatgatcttgccaccgcactccagcttgggcgacacagccagactttatcttaaaaaataaaaaaatccataaaagtatttattttgattactaacattacccttcggagccctctttggtctccctgcctcccctggctccgcacatctcccagtcccccgctggctcagaatcctcccgtatgctgcacgcttctgagcactcccgccccctcccgcaccccagcaccccacgcatccctccctcacctcaccctcctgcacccgctcccgcaacccgcgtgcccctcggcatccccgagtccggagcatccccgcatcctcccgcagtggaggacgccaggtggcgcctggagccatcggaggacgtagggaggaggggccctagggccgggtgaagtctgccggtgacccatgacgtctcgaggctctgtgcctttccattggtcggctcctcgaggggcggggcgggacgcgtggtgggcggagccggttgacctcagaccgtccgtctgtctttcctcctcctccaggttccccgaggaaaccgtggcccgagcgccggccaccgcggcccgctgcgaccaggacagcgcccccaaccccgtccccaggtccctccgcctctccgggacccccaggcccagcgctgacctctgactccagtcgagagctcactccccactcagccttgacgtccgaggcgacctctgacgctccggacacttcaccacccaccccagacccggcctcccggacgaaccccgacctcatcttgacaagccctgactttgctttgtccacccctgactccagtgtggttcccgcgttgaccccggagccctcacccacgcccttacccaccttgcccaaagagctgacctctgacccttctacaccgtcggaggtgaccagcctttcccctacctcagagcaggtcccagaatctgacacaaccccagatttggacacaactccatactccagtacagtctcagaatattctagatccccagacccctccccaagccctcaccccactactacccctgatcccaccatggcccctgaccccatcacaacccttaaccctactgtgacccctcacttccctaccacccctcaccccaccacgacccctcaccccaccaccatcactcactccaccatgattcctgaccccaccacaacccctcaacccttcaccaccatcactcactccaccatgattcctgaccccaccacaacccctcaacccttcaccaccatgcagcccaccacaacccctcactccacaacccctcaccccaccacgacccctcatcccaccaccatcactcactccaccatgattcctgaccccaccacaacccctcaacccttcaccaccatgcagcccaccacgatgcctcatcccaccacgacccctcaccccaccacgactcctcaccccaccacaacccctcaccccaccacaacccctcaccccaccatgactcctgaccccaccacgaccccttaccccaccactactcctgatcccaccacgacccctcaccccacaactcctgacccttcctcaacccctgtcatcactactgtgtcccttccaacctccttggggacagaactctcctctcccactctagcaccaacagtcaagcccagtctgcacccccagttgaccttcacagcacctgcccctcacacctccacatcccagatacccaccttagagccctctccagccttggagtccagcccctccaggtcctccacagccacaagcatggacccactgtccactgaggacttcaagccacccagaagccagagccccaacctaacccctccacccacccataccccacactcagcctctgaccttactgtgtcccctgaccccctcctttcccccacagcccaccccttggatcatcctccccttgaccccctcaccctagggccaactcctggtcagagcccaggcccccatggtccatgtgtggccccaacaccacctgtaagggtcatggcttgtgagccacctgccctggtggagctggtggctgctgtgagggatgtgggtggtcagctgcagagactgacccaggtcgtggaacaggagcggcaggagcgccaagccctgctgctggggctgacgcagctggtagaagctgcccggggtctggggcagctgggtgaggctgtgaagagactggcagagatggcctggaccaccagcatgcctgcaccaaccaccactaccccagaggaagaagaaagacccctgaggggagacgtgtgaccctctccaggatttgaggggcttaagacacccccaaccaaaaaaaacaaaaacaaaaaaaacccccaaagtatctaattaaaaacaaggtgtgaatggtatttttggggaatcctagaaagacagaatcacaagactgattttgatatgtgaatagcccaggtgccatgccaggcggtgttgatgatggagatgattatgagggtggtgatgatggtgatgatcgtgatggtgatggcgacggagatcatgatagggtgatgatcattgtggtgagggtcatggtgataatggtaagatggtggtggtgatgaagatggtgaaataatgctgatgatcatgagggaatggtcatggtgatgaggcggtgaacatgatgatgatgattatcatgatgatgatgatggtcctggtcatgagggaatggtcatggtgatgaggcggtggacatgatgatgatgatgatggtggtggtgatgatgatgattatcatgatgatgatgatggtcctggtcatgagggaatggtcatggtgatgaggcaatgaccatcatgatgatagtggtggtggtgatggtggtaattatgatgatgatgatgaagatggtgaaatgaaggtgatggtgatagtgatgattgtgagggaatggtcatggtgatgaggcagtgaccatcacgatgatggtggtggtggtgatggtgatgatggtggtgctggtcatgagggagtggtcatggtgatgagggaatgatggtaatgatgatgatgatggtggtgccggtggtgatcatggtgatgatggtcacattgatggtgacggtgatggtggtagtggaggtgataatgatggtgtgaaaggtgatcatggtggtgatgactgtgaaggaacagtcttggtgatgaggcaatgatggtaatgatggtgatggtgatgatgttggtgattatggtggtaaagatgatcttggtgacgatcatagtgatggtcgtgacaatgatgaagcttcgtgtgagcaaaaacggccttgttcatggatgtaagcccagtttctaggacagaagctgatgcagagtacacactcagtaataaatatcttttgaatgaaagagtgcatcatcatcgtcatcatcatgactaatatttgttgggcgcttcctatgtgtcaggctctgttttaagagctttgcatggatgatgatgtcattttgtcttaacgagtgcctgctgaggaaggtagtgttaccacagctcagcagatgaggaggtgagctttgcagcctggattcctgagtttgagtccttgctgggagtaaacataagccagttacttaacctctgggtctgagcttctccaactataaaacagggataataatagtacacatacctcatggggttgctataatgattgaataagttaatacctaggagagtgcttatgatggctcttgataagcgcccgtcatgtgagagcaattattgtatttatccccattctgcagatctgggcttcgaggcacagagaggtttggtcgtgcaccccagatcactcagggaacacgtggtgggccatgcttggcactcagggcccttgctcttaaaataatattttggctggccatagtggctcatgtctgtaatcccagcactttgggaggccgagatgggaggatggcttgaggcctggagttccagaccagaaatatagtgagacccccatctttattaaaaaagaaagaaagaaaatattccacggctgtgtcagactgacctgggttcaagtcctggattaaccatgtcccggctgtggaactctggcagtttccctcccttctctgagcctcagttttttcacctgtaaaatgggtagagcaatagcacctgcctcatggggttgtgaggattaaatgtggcagtgcagataaggacaacgtggcatgtaggatgtgctcagttaatgacagtgcttgcgaccacgcctgcctgtacttttctgtgctaacgctgcatggactgttaatccacgtacatccagtcctcaccacagccctttgagggagaaactttgatccccgtttcagaaaggactctgaggctcagagagggcaggcccgttgccaaagggcacacggcagagccagggactcaaaccctgaatactgtgatgtgaatttccgtgctttgaccatggcctgcgtttccagattggggcttccatgactgccccactccaagcgaccgtgggtgggctccttcccatctctgtgcctcagcttgctggtttgtaaattgggggccgtctcggaagaccccactactctgattctgggtcctgcagcctcaagcaggaaaccatttcctcctcctcctcctctctcggcttagaggtcgtggaaggtgatgaaggctggcgcccccacagtcctgcaaaggccaacagggtccagttacttgggcgggggggtggcggggtgcggataacgtctgggggtcctgatagatggacggtctgctcctgccagcgggcgaaggagcatgctgagaattctgttccccagatctcattaagccctgagacttaaataactgctgactggttccctggagaggctgaggggagagcttctgccctggggagatggggggtcacagggcagcaccccaacatggaagaaaacggctccttttccaggtccaggtgggagcagatgaacgct[450 bp omitted]cagaacaaagttggagcagagaggacttcttcatcagataaggggtacgaaggaagacacgtatctttgattttccctgggcaatggatgtgatctcctatgagcgctgacacaggaggccccgaagaacgcagcaggtaagcggtttgcgtgagtgagagctgggcccgatgctggatccatactctaaagtcatctcacattccttgcacctcaaaatgtgacccacgggcctgcagcattggactcatgtggaagctgtttacaaacacggaatctcatgctctgcctagagccaccaaagcaaattctgccttttttttttcttaactttttttttttttgagacaaagtctggctctgtcgcccaggctggagtgcagtggtgcgatctcagctcactacaacctccccctcccaggttcaagtgattctcctgcctcagcctcccaagtagctgggattacaggcgtacgccaccatgcccggctaatttttgtttttgtttttgttttcttttttttgagatggagtctcgctctgttgcccaggctggagtgcagtggcgcgatctcggctcactgcaagctccgcctcccgggttcacgccattcttctgcctcagcctccggagtagctgggattaacaggcgcccgccaccacgcccggctaattttttgtattttttagtagagacggggtttcaccatgttgaccaggctgatcttgaactcctgacctcaaatgatccacccacctccacctcccaaagtgctgggattacaggtgtgagccaccacacctggcctttttgttttcttttcttttgtttttcttttgagacagggtctcactatgttgcccagcctggagtgcagtggtataatcacagctgactgcagccttgacctccagggctcaagcgatcctcccacctcagcctcctgagtagctgggactacagatgcacaccaccacacccggctaatttttgtaattttgtagagatggggtttcaccatgttggctaggctggtctcaaattccccacctcaggtgatctgcctgcctcggcttcccaaggtcctgggattacaggcataagccaccgccccagcccatatggtagactattcagtgtacaatagcatcatgtctaaaaaaaagtatttaatctgggcatggtggcacgtgcctgtaatcccagatacttgggaggctgaggcaggagaatcgcttgaacccaggaggcagaggttgcagtgagccgagctcatgccattgcactccagcctgtgtgacagggcgagactctatctcgaaaagaaaaaggtatttaattacatactttaattaaaaatactttattgctaaacatgctaatgaccaccggagtcttcagcaagtcatagtcgttttgctggtggaggatcttgcctcgacgttgatggctgctgactgatcagggtgatggttactgaagcctggggaggctgtggcaatgtcttaaaataagacagtaatggagtttgctgcgtcaattgactctttctttcatgaaagatttctctgtagcatgcaatgctatttgatagta[306 bp omitted]gcgtggtggcgggtgtctgtagtcccagctactcgggaggctgaggcaggagaatggcatgaacccggaaggtggagctcgcagtgagccgacatcacaccattgcactccagcctgggtgacagagcgagacttcgtctaaaaaaaaaaaaaaaaattaaccaggtgtggtggtgtgcacctgtagtcccacctacttgggaagctgagatggaaggatcacttagcccaggagatggaggcagcagtgagctatgattgtgccactgcactccagcctgggtgacagagcgagaccctgactctaaaaaatttttaaaaattgagttaatcttctccaacccggctgctactttattaactaagtttattaacattctaaatcatttattgtcgtttcaacaacattcacagtatcttcaccagaagtactttccatctcaagaaaccactttttttggtgctcattcataagaagcaactcgtctgttcaagtgttatcatgagatggcagcaatttaatcacatcttcaggctccgcttctaattctagtttcattgctatttgtaccacatccgcggtgactcctccactgaagtcttgaacccctcaaagtcatccataagggttgaaatcaacttcttcctaactcctgttaatgttgacattttgacttccttctctgagtcacgaatgttcttaatgacatctagaatggtgaatcctttccaggaggttttcaattgactttgtccagatccatcagaggaatcactatatatgacagctatagccttacaaaatgtatttcttaaataatgatacttgaaagcaaaattactaaggccaggtacggtggctcacacctgtaataccagcactttgggaggccaaggaaggaggatcacttgacgtcaggagtttgagaccagcctggccaacatggtgaaaccctgtctctactaaaaatgcaaaaattagccaggcgtggtagcgggtgcctgtagtcccagttactctggaggctgaggcaggagaatcacttgaacccaggaggcggaggttgaagtgagccgagatcgtgccactgcactccagccggggtgacgaaaacaaaactctgtctcaaacaaacaaaaaacaaaaacaaaacaaaacaagaaagaaagaaagaagcaaaaaagataatacaaactctcaataaactagttgcccaggctagtctcaaactcctggcctcaagtgatcgtcccacctcagcctcccaaagtgctgggattcaaggcatgagccaccgcgcccgcccatgcttttatattctttcacacacgtgcatgctttctcatacagtgtcttgatctctcacacatagtctcataatctcacactcatccttacactcacatctacacctgtactcaatcaaacgtttatgttcacccccacacatacagctcgctcacgctcacaagcttactccctcatgcacactcacaatcacccgcacacacaccctcacccccacccgcccactcacccacacccccgtgcccccaagcccctcctcccgctgagcacggcaggacatccctgcaggttaacagcagggaccatgtgctggagcccagctgggttcgactccaggctttgccccccggcccggtgtgtgggcacggcgggaacctggctgccccgtgcgtgagatgggcagagcccagggacccccgccaccatcttggggacaggtcggggagcagacgtggcctctgagatccctggttggggttcagcctccggccagcactaagcattacttaattagtgtcgtccctgcctgcctgcctgccggggtcaggccattcctgggaagtttatgtcctcccctgtgcttcacccatgacaggctggtcattatcacctttcagataatcctcagctgccgccagcaatcaacacctcgtgcccccctgccccctgcccagtctccactcccacccagcatgccgcatcccagccacctccagctttttgggacacattcttggcctaacagctcaggctatttcagattcacagataaaggggcaggaagtcttgatatattccacccccaccccccaccccccgcgttgttgactcccctcttctccccaatgatccctactccaggaagctcacccggattgtccaggtcagaggccccaactctatggcttgaacctggattcgaaggctccttggggtcactccacaggagcacacctgctgtcagccccgctccaggcaacacctcggtggccacagcaggcgccctgcggggtatgcaggggccagggagtgcgtgacacacgatccagctccgagttgtagccttgctctgggcctgaggccaaggagggcgcggagaggaagagacagtgtttgcaaacagggcagctgccaagcaggggcgggggagagaggaggaaggtgcgaaggagagaaggcccaggcggcgcccgcccgcggcgcctgcgtgaccttcccaccctggctacacattgacaggcatatgcgcgcacacacacggatccgatgtccacacatagcaagtcacattcactccccatacacacaagtacgtcagcacacacaagctcagatgctcatgcagacacagcaggcacaaagctgtattatcatccacgtgcagtgagacacacaacgccatcctccctcctttccatgcatatgcattcacacacgtgcacacacatgctcacacatgcacactcacactggcgtacacatactcatgctcacacatgacattcacacttgcacacacgtgcacacacacttatgcttacacatgtacactcactggcgtacacactcatgctcacccacgaatttacatgtgcacacatgtgcacactcatacatgcacacacattcacacttgcacacatgcacacacacatactcgtggacacatgaatactcactggcacacatactcatgctcacacatgacacacacttgcacacatgtgcacacttgtactcacttatgcatatgcatactcaatcgcacacacacgcacacactcacacacactcatgcacaggacagtcacacttgcacatatgtgcacacttgtactcacacgcacgcacacacattcatacttgcacacatgtgcacacacacgcaagtcatggacacacacgcacagtcactggcgtacacactcatgctcacccacgaatttacatgtgcacacatgtgcacactcgttcacacttgcacacacatgcacacacatactcgtggacacagatgaacactggcacatgctcacgtatgacattcacacttgcacacatgtgcacacttgtactcacatatgcatatgtatacactcaatcgcacacacactcatgcacacaggacattcacacttgcacatatgtgcacacttgcacacacacattcacacacattcacacacatgtgcacactcacgcacacacacatactcatggacacacatgcacactcacactcatggacacacatgcacactggcacacatacgcatactcatggacacatgcacactcacactcatggacacacatgcacactggcacacatacgcatactcatggacacatgcacactcacactcatggacacacgcacactggcacacatactcatgctcacacattactgacttgcacacatttgcacacacatgcacacactcacaattgcacacacgcgcacacactcgcacaatgtgcacactcgcatgcacgcacactcacactcagacacgtgcacactcactggcacacactcatgctcacgacattcacacttgcacagatgtgcactctcacactcatatgcacacgcatacactcacacacatgcacactcacacacactcatgcacacatgcatatagagttccttgatggaagctttgagaaccatatctttcattccattgttagcacacaaactttggtttggtaaaggagagggattcttagaagcaggtggctcactccctcctgcccacagctctgccatcaggaccccctgcaggacagcagggaggctcaggcagcaccatgagctcaggcagctcatcctcgcccctccgtctctctctctcccttcctctctgtctcttttctgtctgtgtctctcttcctgtgtttgtctctctccatctctgtttctctctctgtctctgtctgtttctctttctatctctgtatgtgtctgtgtctgtttctctctctctcttcctccacctgtttctttttgtgtgtctgtttttctatctgcatctctccttctttttctctcccccgtctctgtttctctgtgtgtgtgtctctgtctctctccatctctccctgctgtttctctgtgtctctgtctctctacctctgcacccccctccctcctccacacgtcctctgatgcacactccccttctcgttcccgagcagacagactcgcagcagcactgggatctgagcgccagatggagtttatttgcagagtggctggggcgagagaaggcaaaacacatcacagagagggtggtgccaggtgggagggagacccggccggagagaaggagagaggacggcgggaggacagggacggaggggaggctgcgccacaccagacaggctaatttatttaacagacatttcctgatccctgctgcaggccatcgctgagtacatggggtctgtcagcagacggaaggcggcaaagacccccgactccaggagctcacaaaataaccacaaaaaataagccatgcagttagaagaggatacacgtcctagagcaacagcagagtggggggatgaggaggcagacagtaagcatttacaacgcgcagctgtaatcccagcactgcgggaggccgaggtgggagactcgctccaggccaggaatttgagactagcctgagcaacacagcaagacccgcccccaaccatctttttaaaaagttaaaaattagcctagcgtggtggcgcatgcctgtagtcccagctactcaggaggctgaggcaggaggattgtttgaggccaggagttgacacccacctgggcaacatagcaagacccctccatctctaaaaaaagttaaaaattagcctagcgtggtggcgcatgcctgtagtcccagctactcaggaggctgaggcaggaagattgcttgagctgtggattttgagactgcagtgagcagagatagcaccactgcactccagcctgggagacagagcgagaccctgtctcaaaaaaaataaaaatgcgaggggtgaggggatgagcctaaagtgccctgagcaaacagcaagtgcagaggccctggggaaggtggcggcaggtaccgagagccacgcggaggtctgagaccctggggaaggtggcggcaggtatggagggacatgcagaggtctgaggccctcatggaccaagggaggaatgcagcctgcagagaggagagaggaggaggacgccgaggggaatcccaagccccatggatgaaaacacaccgaggagacaccaaaagccgttggccttgggggcctcgggtggggcggcttccctttctgcatcccccggggcctcctcactgcccagcctcctcttccaccgctcccactgcctccgcctcgccctcccgctgcctccaggggcgccccaggtgctccctgatggcgatcacagcgctcctccttcgggggtgagggtccagcagcccccgcagaagcgcgtcggccgcggcggccaggccgaaccagggctgagggcggtcccggggctggcccgacgcctgccagatgaggaagtcctcgtagaaggggtcggcctcggccaggggccggtcccaggggaagtagcccgtgaggaggcagaagagcaggacgcccagcgcccaggcgtccagggcgggctgaatgggcaggccctcggggagcggcgggggcgcgcagagctcgggggccgtgtaggggatgggcggcccggccaggcgcagcagcgtcccgcgaggcctcgtgtggccgaagtcggtcagcttgaagcgccggcaggccgggtcgcacaccaggacgttctccggcttcaggtcccggtacaccaggccgcgggcgtggatgtactccagggcggaggccagctgggcggcgcagcggtgcaccgcgggctgcgggaggcccacctgcggggagaggggtcagggcccagtgccccggggccacggaaggcaaccgagacccaggaagcaggcccaggacgccaaggaggccggtaaggaagacggtgaatagttggccctgtgaggcctagtgtgacctgtgaggcctgcgggtttagtgtggcctagggtgaccccgtgaggcctagtgtgacctgtgaggcctgtgggtttagtggggcctagtgtgacctgtgaggcctgtgggtttagtgtggcttagtgtgacccgtgaggcctgtgggtttagtgtggcctagtgtgacccgtgaggcctgtgggtttagtgtggcctagggtgaccccgtgaggcctagtgtgacctgtgaggcctgtgggtttagtggggcctagtgtgacctgtgaggcctgtgggtttagtgtggcttagtgtgacccgtgaggcctgtgggtttagtgtggcctagtgtgacctgtgaggcctgtgggtttagtggggtctggggtgaccctgtaggacctgtaggttaagcggggcctcgggtgaccctgtagggcctgtgacttgattggggtccagtgtgacctggggctgcctggtgagtctccatggtgtatcgtgtgagttctgtgatgtctatgaactccaaagaggcctaacaactccacgagtcctgtgggccccacgaggggcctccggggggtaggggaggcccagggaggcccaacgcagtggctgtggctcctgcggcccaggctgctcaggacgttcctgggaggccggtgaggcactcggaggcggcctggggtctgcctacgcaccttgggctggatgaaggccatgaggtccccgtgcaggacgggctccgtcaggaagctgtaggagtgtgccgactcgatgccaatgccgtaggccgtcacgatggctgagtgcgcgcccagcgagagccccacacagaactcgtacaggaagccacggagggacgtgcggggtttcgggagctgcttcagtgccaggggtgtgcctggggcagcagggacaggtatgggaggcgtgcagcagccaagggccacctgggccagctgctctgttcccctgtggtcccctcaatggcccctcagcttggactctttcccatagaccatctccacctcctccaactcccacctccctcctgagcccatcctaacagcatggccacccaagcatcaccagcggtaccaatagttatagcacgctggggaccagctgggggctcaggcctgcgatcccagcgctttcagagaccgaggtgggaggatccgttgaggccaggagtttgagaccagctcggacaacacagtgagaccctacctctaaaaaaagttttaaaaaggccgggcactgtggctcacgcctgtaatcccagtactttgggagaccgaggcgggtggattgcttgatgtcaggagttcaagaccagcctggtcaatatggtgaaacctcttctctactaaaaacataaaaatctagttgggtgtggtggcgcatgcgtgtaatcccagctacttggccggctgaggcaggagaattgcttgaacccaggaggcagaggttgcagtgagccgagattgcgccactgcactccagcctgggggacagagtgaaaaaaaaattaaaaaaataattagctgggcatggtggcatctgtaaaaaattaaataaaataataacagtacgtggtgaatttctaccttgctttcttacaagtctatagccatggagatggagggataccatgaaatttctccaatgacctcgtttggcttctcatgacagcaaactcgtgtttgaggcaaaaaggtatttttgagacacctggggaaaaggtaacccacactgggtaagaaagccaattaggaattgtggattttgtcacgtgtggaaacgacttcctagaagctaaactccccgaaggaacttctgatgtcttccttttttttttttttttttttttttgagatgcagtttcacgcttgttgtccagactggagtgcagtggcgtcatctcggctcactgcaacctctgcctcctgggttcaagcgattctcctgcctcagcctcccgagtagctgggattacgggcacctgccaccatacctagctaatttttgtatttttagtagagatggggtttcaccatgttggtcaggctagtcttgaactcctggcctcaggtgatgacccacctcagcctcctgaagcattgggattacaggtgtgagccactacacccgccctttttttttttttttttaagacagggtctttctctgtcgtccaggctggagtgcagcagcacaatcatggctcactgcaacctccgcctcccgggctcaagcgattctcctgcccaagctccctgagtagctgggactacagttgtgcaccgccactgggctaattgcacaccaagctgatttttttccctgacaccagaaattcctgctaactggctaagttttttaaaaaaaatttgtagagacggtctcgctatgttgcccaggctggtctcaaactcctaggctctaagcaatcctcctgccttggcctcccaaagtgctgggattacaggtgtgagccaccatgcccggcttggtttctttgatttctgagccatcagctgccagggtgcaaccttccccctcacaaggccgtgtgtaactgggataaattccctccttattggcccagcgcagtggctgatgcctataatcccagcactttgggaagccaaggtgggcggatcacttgaggtcaggagttcgagatcagcctggcaaacatggcgaaaccccatctctactaaaaaatacaaaaattagccggtgtggttgcacatgcctgtaatcccagctactcggaaggctgaggcaggagaattgcttgaacccaggaggcggaggttgtagtgagccaagattgtaccactccactcactgcagcctgggtgacagagcaagactccatcttcaaaaaagaaaaaaaaggaaaagaaaagaaaggccgagtgcagtggctcacacctgtaatcccagcactttgggaggcccaggtgggtggatcacttgaggtcaggagttcaagaccagcgtggccaaaatggtgaaatcccatctctagtaaaaatacaaaaatcagccaggtgtggtggtgcatgccttgcctgtagtcccagctattcgggaggctgaggcaggagaatggcgtgaacccgggaggcggagcttgcagtgagctgagattgcgccactgcagtccacagtccggcctgggcgacagagcgagactccgtctcaaaaaaaaaaaaaaaaaaaaaaaaaaaaaaaaaaaaaaagaaaaagttccttccttatcaaaaacaccagccatccccgcccactctgcagccagatgcagtggggtctcttctgcgtgttcacagcgctcctgatcactgccgccacggccacgccacccggtgttggcgatccctgcccatctatgctccccacggtgccctgagcttcttaacgacagtgacatgttcagggccccagcatcatgcagcccaggggcaggtgtgctggaggcctccagatacaggttcagtgaaatggccatggaggggcctcattggcaatgcccccgcctgttactgctcatgcctccggctttgtgagcacccagggctggatctctgcatccgtggctcttcctgaggtgtgctgttgtgtggctgtgttattgccctctgtgttattactgaattgtgtatccccaaaactcgtatgtgggagtcctaacccccccagtgctgaatgtggctgtatttggagatggggtctttaaagaggtaaaatgaggtcactagagtgggcaggccctcatccaatgtgactggtgtccttataagaagaggagatcaggacacagacacacacagagggacgaccatgtgaggacacagggagaagacggccaaatgcaagccaaggagagaggcctcaggagaaccaaccctgctgacatcttgatctcgggcttccagcctccaaagctgtgaggaaacagagctctgttgttggccaggcacggtggcgcacacctgtaatcccagcactttgggaggctgaggcaggaggaccacttgaggccagtttgagaccagcctgggcaacacagtgagaccccatcttaaaaaaaacatttaaaaattagccgggcatggtggcatgcgcctgtagtctcagctacttgcagagctgaggtgggaggatcccttgagcccaggaggtcaaagctgcagtgagctatgattgtgccactgcactccagcctggacaacagcgagaccctgtctcaaaaaaaaaaaaaaaagaaaaaaaaagaaaagaaaaaaggccaggcacagtggctcacacctgtaatcccagcattttgggaggctgaggcaggaggatcacttgaaataaggagttcaagactagcctggctaacatggtgaaaccccatctctactaaaaatacaaaaatgagctgggcatggtggcatgcacctgtaatcccagctactcggggggctgaggcacaagaatcacttgaacttggaaagcggaggttgcagtgagctgagattgtgctactgcactccagcctgggcaacagagcgagactccatttcaaaaaaaaaaaagaaagaaaaaagtcaaaagttctgttgtggaagcgcctgcctttgttatggcagccccagcagatgaatgcacactttttctgcattcatgctaggagatttttgaaggcagggactggctctggttcaattctgggtccactgcccgcccaacccccccagcacagggctggcctcagaaggcgtgccctgaactgactgacctcaggttgcctccctattttccgtttcatggaaggacacggtgcttggcagaaaggcccagggtagtggggagctgtcctgcgcacccactgtgtgccggccttgctaagtgcttagcagacagcatcactctgcatcatcccacggtgaccactacagccgccacaggaggctcctgagctgggagctctgtcttacccagcattatacaaccccagcaactagagcagtccacattcactcagaggatccaccattcttccaagtagaaatcatcacccacattttccaaaggaggaagctgagactcagagagggcaagggagttcctcaaaacacagtttttggcagggcaccgtggctcatgcctgtaatcccagcaattgggaggctgaggcaggcggatcactggaggccaggagtacgagaccaccctggccaacagagtgaaacctcatctctactaagaaagaaaaatacacacacacacaaatgtagctgggtgtggtagtgcatgcctatagtcctagctacatgggaggctgaggcaggaggaacacttgaacctgggaggtggaagttgcagtgagattgtgccactgcactccagcctgggcggcagagccagactgtctcaaaaacaaccaaccaaccaaaagaacaaaaaacaaaaaacacacagctttggagggcagaggtaagacttgattcaggcctgccagcctccccagcctgggctaccccaggcccgtgccccgcccccagctgaaccctgccacctctggccccacagcctcgtacctttctgacgatgggtgaccagaaggacgcggccatagcaaccctggcccaggggacgcacttcctcgtagagctcgtccacctcggctcggaccagggtctgagcactcagcgtcatcatgtcctccagcgcgcgggcagcctcctggccctgctggagctcctctaatgtcaggccgcccagaccctcctcctcgctgtcctccgaagcccctgcctccgccggcccttcctcagactgtttgccgggcatctctgcgagaacagagaggggtgcccaggctcaggtcccaggcccaagggaggaggggactgggggtctggactcctgggtctgagggaggaggggctgggggctcatcgcgcttctcattgtgactcagtctccctcttggtgagaggtggggagacaagtctggtgtgagttcaagccccaggtcacagatgtccctgcccgcgtgccgccgccgccacccgcccaccctgaggttgaaagatgaaccagataactgagactcccccatcttgtttccaaagcaaacagacttgggccctgggggtggatgagtagactctgtctcctgagaacaaacaggtgctcttgggctcagggctgggagggcgggctgtgcagagggcctgggacgcctgggtcctgcatgggaccgagcacttgggatcagtccccaagctcctgacaggcctggggtcccactttcacagcccacccacctccctccgacccagccccccagcccctcctccgccaggcccaggggtccaggcccccagcccacctctctcccggaacctcatacaattcacacaactggggaccccctgattctgtttccctcaccctccaccgctctacagcctccaggtgcagcccaggctcccctgagggaccgaggactcgggccacctggtacagtcaccctcaggtgctgcccacctcaggccagggcaccttgcccacctcccaacctgggctcagacctccagacctcacctcctccaaggccctcctgaccctccggccgccggctgtggtcagtgcccggcacttagggctcatgccagcagaggcctgcctaggagcaagaccccgccccgactttgggggtcgtaaggccccgcccctgggcccgccccttctgcccccactgggagcagagcgacatcgtgtgatgactcctggaactggctgtggtcaggtgaataccctgacccaagagttgagccctcctccttcagacccaggagtccaggccccagcccctcctcctccctcagactcaggagtccaggcccccagcgcctcctccctcagacccaggaatccagtctcccagtgcctcctccctcagacccaggagtccaggccccagcccctcctccctcagacccaggagtccaggcccccagctcttcttccctcagacccaggaatccaggcccccagctttccctccctcagacccaggaatccagtcccccagtgcctcctccctcagacccaggagtctagaccccagcccctcctccctcagacccaggagtctaggtctccagcccctcctccctcagacccaggaattcaggtctccagcccctcctccctcagacctaggagtccagacccccagcccctcctccctcagacccaggagtccaggccccagcccctcctccctcagacccaggagtccaggccccagtccctcctccctcagacccaggagtccaggcctcagcctcccccacccatctgaagttttccggcagaactgaggcctccccaccccctcaaggcctctcttcccagttgctccagcacctgcttcccgcccctctgagtctgaggtcatcccacactgcatcgttctggaatctcattgtctcattctttccccaaactagaccccagcatctgatcccctggacacccctctccaagcacttgtgtctgacctgtcaatggggcattgatggggcagctgggtggggtcaaggcaggggtgggttccagaaatgatttcattttctacacgggacccggactcctgggcctgatggaggagggggttgaggacctggactcctaggtctgagggaggagggggttgaggacccggactcctgggcctgagggtggagggggttgaggacctggactcctgggcctgagggaggagggggttgaggacctggactcctgggtctgagggaggagggcctgagggctcctgattccaaagagaggaataacaataaaaatagtttgaaagcgcataacaggaatacaggccagtgagtgcctccctgctgtaagcacagggagattaagccccactaggaagtccccaagccttgggccacagtgggacttcagacccctgtttttttctgggacggttgcacccacccttcagggttttttatttcttttttttttttttttttttgctttttgagacggaatctcgctctgtcacccagactggagtgcagtgacgtgatctcggctcactgcaacctccaactctctggttcgagtgattctcttgcctcagcctcccgagtagctggaattacgggcatttgccaccacgcctggctaatttttgtatgttttagtagagacagggtttcaccatgttggccaggatggtcttgatctcctgacctggtgatccacccgcctcagcctcccaaagtgctgggattacagaggtgagccactgtgcctgggctatttttatttttttgagacagggtcttgctctgttgcccaggctgagtgcagtggcccaatctcagctcactgcaatctccacctcccaggttcaagcgattctcatgccttggcctccagagtagctgggactacaggtgcctgccaccactcctggataattcttatatttttagtagagacagggttttaccatgttggtcaggctggcctcgaactcctgacctcaggtgatccacccgcctcagcctcccaaagtgctgggattacagccataagccaccgtgtctggcccacccttcaggtttatactgccatgactgatgtgaagtcacttcatttttttaaataaactttttattttggaatcattttaggtttataaaatggttgccaagatcctgcggagagttcccatgcaccctcccccagcctcccctggtgtcggcatcgcgatgcaaaccgtgagacatttgtcaaaactacgaggctcacagttgggccaacaccagactgttatttcagcagcgcttccacgatggatcgagcccaggatgccgtgtcgtatgtagtgagctcacttcccagcctggaagcataccttcctgcttaggaaacacagtttccagttctggaccctccgctgggtgctggggtcttggatttggatctagttcatccccgtcctgcaggcgtgaacctccacaagccaggctccgtgtcctgtctggcaggtgccatgggactgcggggcgcgggctggccttggtgaggaaggagacccatgggtaccaggcctggctcttaggattgacgggtctgagaaagggggacggagctgggacaatcacaatccgtggtgctctgtgggagcagaactgggaaggatctaaatatggagaagaccaggtccagcctggacagtcagaaagagacatggattgttctaatacaagttccccaggaggccagagagggctgggggtgggggccactttctggagccatgggtcagggggaagatgctctcggtggaggccacacagtgcgccaatgtctggcagcagctgtgcgtgcatgcgtgtgcatgcgtgtgtgcacacatgtgtgcatgcgtgcgagtgcgtgtgtgtccatgtatgcacacatgtgtgtgtgcgcgcgtgtgtgtgcatgcatgtgcgcatatacgcgtgtgtgtatgcgtgagtgcatgcacatgtatgtgcgtgtgtgtgcacacgtatgcacccatgtgtgtgtgcgcgtgcgtgtgtgtgttctcacatgtgtagatttaggtccagaacagatgagtggcgcccatgacatcacccacagcccagagaaatgggagaggtggagggtgaggtttatatggtgtcggatcctaaagttcagatcttgtgacatggacagcgggagccacggaaggtcttagaggagaggagtgatcccatcagaactccatgatggccaggcgtggtggctcatgcctgtcatcccagcactttgggaggccaagacgggtggatcatttgaggtcaggagttcgagaccagcctggccaacatggtgaaaccccacctctactaaaaatacaaaattagccgggtgtggtggtgcgggtgtaatcccagctacttgggaggttgaagcaggagaatcacttgaacctgggagggggaggttgcagtgagctgagatcgcgccactgcactccagcctgggtcacagaccgagattctgtctaaaaaaaataaaaataaaaaagaagacactctggacggagggaagaggaaaggtccttgagggaggaagggatgggagcctggatcctgcgtctgagagaggaggggcaggagctgggctcttgggtcctcagttggaagaggaatgcgcgtccaagcccagcgttccgtagggagagtgcaatgtgttccctctctgtcctcccgggtgcagctgtctctccatccaggtggccctgggggctgggggaagggcctctggcccaggctctggccacctgtctctgtcacctggtcagggagctcccccatctgtccccgtcctcccaccacttttgctgtcatcaccctcatctgtccactcctccaggcttgagcctccctcctccctgtcctcataggacacggcgctccccaaaaccccaggtccctctctgttcccttgcaacccccagtcgtcccccaggaagtccaggacagccagtggggggctcctagtctcgggatccaggtccagaagcccctggagcaaggccagggctgggggcgcaaactggtcccagggtggtggtggctgaggtggctgaggcttggtggtcacccagccagcgaaggcctcgaactcagggttgggggccagtgccacgtcccaagggaaacaggcagtggcagcacagaagagaagcacccccaggccccaggagtccacggctggccgcagaggcagggtgtcgggcggtagcaggagacagagctcaggcggtgccgtgggcagaggcactggtggggcgggggtcgggctgccctctggccgggtcagacccaggtctcccagggccacacggctgcagaccgggtcgaagaccagcacgttgtcaggtttgacatctgcgtggaccagcccccggctgtggaggaagtccagagctcctgccaactgggccaccacccgcttcaccagcagttctgggaggccctgaggtcaagaagacaggaggagggtcagagtgtcttggttttgtcttttttatgttgtccaggctggtctcaaactcctggcctcaagcgatcctcctgccttggcctcccaaagtgctgggattataggcatgaggcactgcaccagttggttccttctgaataatttttgaaagaggctctagattcctaagtcctaaaagtttgactcttggggtttgagaatctagaaccccagactagtggctacctccagtgttcccaccacatgctcccaaagactttctctccatcatcctcaacctcaacctgcagccatatctgcactcctgtagaccaactcccagctggtctcccagttttccccactggaaccccagttataaccagtagctccttcttttagcttctttcaaagattctcctaactcaaacactcaggcccactgtgaacatttcttatatatcttttgtaaactgaccatccagatcttctccagtgagaactcaaatttcattcttaaccctaatcttagtcttgtatgagtctagaccccatctctaactcagaggcttttctaaaattccccagtttatttcatcaattgattatctatccgtctagccagccagctggccaggcagcaattcatccatgaagccatccatccttccaacagtattgaacagtgtgtccatccaacatccattccaccaaccagtcagcaatccaataagttattctgttatttaatatccaacatccatatattcatcctcccttgcttcctttcacccatccactcaccatccattaatcatccatccaccaatccttccgtccacccacccatccatccatccactcaaccaatccttccatccacccacccacccatccactcatccatccaccactcactcacccaccaaacctttcatccatccatccatccatccatccatccacccaccaatccttccttccatccatccacccatccgcccaccaatcctttcatccatccatccatccatccaccaatccttccttccgtccatccatccatccgcccaccaatcctttcatccatccgtccatgcagccatccacccacccatccatccaccaattcttccatccacccacccacctatccactcaaccaatcctttcatccacccacccacctacccatccactcatccatccattcactcacccacaaaacctttcatccatccatccacccatccatccacccaccaatccttccttctatcgatccatccatccatccatccatccgtccatccacccaccaatccttccttccatccatccatccacccaccaatcctttcatccatccatccacccctccatctacccacccacccatccatccacccacccatccatccatccatccacccatccatccatccacccacggatccttccatccacccacccacccgtccactcaaccaatcctttcatccacccacccacccacccatccactcatccatccatccactcacccaccaaacctttcatccatccatccactcacctaccaaacctttcatccatccatccatccacccaccaatcctttcatccacccatccacccacccatccatccacccacccacccatccatccatccaccatccatccatccacccacccatccatccacccatggatccttccatccacccacccactcatccatccatccatccactcacccaccaatcctttcatccatccatccatccatccatccatccacccacccacccacccatccatccacccacccatccatctaccagtccttccttccacccatctattcacccacccatctgtccactcacccatccttccatccttctaattctcaatgagactcatttctccacatgtaccttcctcatccccttccttcttttattccttccatttatccctaactttatctcaaatccaaaatctattcctgaaactatccctacccctaatctccaaactcgagagaccctagaatatcatgggttctgtcctgacctggtctcctttctagaagaaaccccattatagcccatctccaactcagtctatatacacatcctcaaccgtctctgcttctctctgcagcccattcatgcttttctccatactcacgatgaatctataatcaactctaaactcaacccacccaactccacccatgcccacaccctaacctcagagtcaactaaaatcccaaccctgtctccctccccacccccttcattgactccagtccatcctcaatcccacccccagctccctgcctttccacgattgtgtttgggtgattggatggattagggttgaggtcaggcatggaacctcgttgagaattagaaagggggaggtcatgtgggggctcagggtggagatggattgggcgggccctgatttggggtcagagttggagacagagacggggcttgggacagagttggacctgggataagcactcccaacctttgtccctcgtggcctcaccctttcctgcagcatcccgctgaggtccccacagggcgcgtactcctgggcgaaggcaaaatagcggggggtctgtaggggtcctgccagggtctgcagcaggcctgggtgtgcagagacgcagcggcccacacagaactccctcaggaaggtgcttctcaggaccaaatcccgacgcaggagcttcagagccacagctggacctgccagggagatgggtcggagggacactcaggcggctccagtcctgctgtggggcctgagggaagccgtgtaaactctctgagcctcacacttctcatgggcagcacgggctcccctgtctgtgaagtgtgggtgggaggagaccttctttgaagaccctccctgctctgcctcggactgcggcgtgggcttgcacagccgcctcaccctctccgggcctcagtttcccctggcatcaagtaagagacacggtggtgacttgggttccaacttgagttgcatacctgtcctgctgtgggaccgtaggcagtccctcgccctctctggggtggggcctgtgtttctcagaagatcccagagctcttaactttcagagtacccccactgagaagggtccccatcagctcctcctgggaatgccccctgtctgggtggcttccgagaatgcttattgtggggcagttggggaggctgcccttgggtggctgaactcacccccctggtgaggctgggcaaggagcacgcggccgtaggagccggagcccagcttccggatgaggtggtactggtcccgaaggctcctcaccggggtcaccctgctggtcgtcagctccaccagccgttggagggctgtggctgtgtcctcctacgggagaggggcagggtgaggagggggcgcgtctggggtccactgagagtggtgggggaggaggtcacggcgcagccccaggatggagggtggggcaggggacaggggtcactgtccccagagaggaggatgagtcacagtgactcacccggactcgggccacctgtttttgtgtcctggagaggttaggggtcactgccacagaggccccgcctgcccctgtctgtgggagcaggccaggagcccccagccccgagtgggggtgcatcctcagcccacacagtccccctgcccaccctggtctctctctccaccgtcctcttcccctgtgcatcccgctgtgtgtttctgagtccaattctctgggggccttggtctcgctgtgtgtccttggatctctgtcatcctctctccctgggtctgggtctctgaggtctttgcgtttccctgttttctgtttctcttcctctctctccccgtgttgcctcctgcctctctctccttcttttctctctctgtcttcctcccctggctcccgtctctcacctctgggtccccatcctcaggggtctcggaggccctgcgctccatctcagggcttcctgatgtggggtggcccttgggcgggacccccccgtcagggctccccagaaagcaaccagccccctgcaccccacaggttctcgctgcgcagagccaagggatggaagctcgtctgcaaggtcagcctcagtcgccccttgtctgtccggctctgtctagctggaggagtgtctctgcctctctgtgccctcctgccaccctctgggtgtattccctgctgtgcttcccaggtgatagcccttactccccacaccctctcttcccctctctttagccaaccccagtctctccttccttctacaggaacacctttctgtcagcctctctcttgctccgtctatcctctctctttgtgcgtctttgtctccttctctccccgtctctctctctccaccctccctgtctctgtctcgcacttgggtctctggggtgggactccccctccctgtcccgtctctgtgggtcgccggcccctctcccctgtccgcacactgtctccactctttctccaccaactctgggggtgtctccacgctctgctccctgcctgctcccctctctctgtctgtctgtttcccgtctctcccggcccctctgggcatctccgtccgctctccccagtgtctctgcgtctctctcctcctctttgttcctgactctctctcaaagcctttgtccctccctttctctgggcctgggacaggggtgtgtgtgacagctcagagacagagacatcctgtccccccacacccctccctcaccccctctgaccgctgccccctccctctcccttccaaacttagaccagcttggactctgggctccagtcccaggacagacgggacaaaacatattgtgaacccccaacaaggcccaggcctgagggcagaggaaagggtgggacagacccctccacacacctgagctgggatgactggcccagagctgagcacctctgtcttgccccagaggccaggagcgctggtgtccagggaccagggaacagttcccaaagccctcctccttcacaccaggagtgctggccccagctcctcctccctcacacccaggagtccaggtccccagttcctccatcctcagacccaggagtctaggccccaagccccacctccctcagacccaagagtccaggcctccagctcctcctccctcagatccaggagtctaggcccccagcccctcctccctcagacccaggagtccaggaccccagcccttcctccctcagacccaggagtccaggcctccagcccctcctccctcacacccaggagtccaggtccccagttcctccatcctcagacccaggagtccaggccccagcccctcctccctcagacccaggagtccaggtctccagcacctcctccctcacacccaggagtccaggtccccagtttctccaccctcagacccaggagtccagactccagctcctcctccctcagacccaggagtccaggccccagcccctcctccctcagacccaggagtccaggctcccagccccttctccctcagacccaggagtacagactcccagcctctccttcctcagacccaggtccccagcccctcctccctcagacccaggagtccaggcccagcccctcctcctgcaggactcaggagctgaagtagctgtgggaagcgccagggacagaggtgctctcatgttctcagcacctgttccgcgcctagccctgtgcggggctttacactggatcctcccagctgcccaaagggtcagtatttatccccagtttacggagcaggaaactgaggttccgagaaacgatcgtgttacacaaggtcagaaggggagcgggccccgggccaggcctgtgtgactcagaggcctgctgcctgccccactcgtgtttccactactactacagccctgctattaataaagacacagcaacggcagcgacgcgtaggcgctggaaggatctgcaggaaacaggctgtggcgctggcctctggggagctggaagggacccaaggaggggcagaggtagaacttcctttgctgttcggaggttagattggggaaagtcgcaaacctacagaaaagtagaaaaagtgctgtccgtgcctgtagtcccagctactgggcaggctgaggcaggagaatcgcttgaacccagggaggcggaggttgtggtgagccgagatcgcaccactgcactccagcctgggcaacagagcgggactccgtctcaaaaacaaacaacaaacaaacaaacaaataataacaacaaaacaaaaacaaacaaacaaaaaagtgctgtcatgaacacccattggctaaacttcacagatgtggccacttggccatactttcttgatctttatttctttgtcggcgggggcatacaaactagtttcaagtaaatgataaatattgaagtcttttggaagtggaaatgctgagctgcctggt[131 bp omitted]accccgtctctactaaaaatacaaaattagctgggcatggtggtgtatgcttgtaatcccagctacttgggaggttgaggcaggagaatcacttgaacccgggaggcggaggttgcggtgagccaagatggcacgattgcactccagcctgggtaacaagagcaaaactctatctcaaaaacaaacaaacaaaaaagtctggcaaaagaaaagaaaatgtgtgtgtgtgtgtgtgtgtgtgtgtgtgtatgggggggtggtgggtgggtggtgagacaagtgagagggaagggactcattttattcctctgtttctggttatgctggaaattttccttcatgaaaagctacaagttataaactaaactacaggcattgtgatgaattgtgcccaaacatttgagagtacctatctgtaaaagtaaggaaaatttctagctcagctacagtaaaattgtcataatgacttttttaacaaaattgaagatgaggccaggtgtgatggctcacgcttgtaatcccagcactttgggaggctgaggcgggcaaattgcctgaggtcgggagttcgagaccagcctggccaacatggtgaaaccccatctctactacagatacaaaaattacccagtcgtggtggcgtgtgtctgtaatcccagctactcaagaggctgaggcagaagaatcgcttgaacccgggaggcagaggttgcagggagccgagatggcgccactgcaccccagcctgggcgacagagcgagagtctgtctcaaaaaaataaaattaaattaaataaaaaataaaaaatttaagatagggtcttgctgtgttgcccaggctggtctcaaactcctaggctcaagtgatcttcctacctcggtctaccaaagtgctgagaatacaggtgtgagccacagtatccagcccaacaatttctcgaaatcagataataacaagtctgtcttcagtttctcacatttatttttttttaaatgccttggctgggcgcggtggctcatgcctataatcccagcactttgggaggccgaggcaggtggatcacctgaggtcaagaattcgagaccggcctgaccaacaaggtgaaacccccctctctactaaaaatacaaaaattagctgggtatggtggcaggtgcctgtaatcccagctactcgggaggctgaggcaggagaattgcttgaacctgggaggtagag[137 bp omitted]atcccgtatgactttcagggaactttttaccactgtgccttttacattatttgaatttttcctgtgagtatgtgttattcaaaaaattttaatgaaataatacagtgatgatgatacagtaatatagtaacactcggtgcttacttggtgccaggccctggtcacgctctctcggtctctctctctttttcacttaagactttgtggagtcctcccaacaagccctgggtcggtagaatgatggtttccaatttcctgatggggacagtgaggcatgaagcagcagagtcatgggccacagagccgcagccagggagaggcagagctgggatgccttgagatctggtgactccaggctcctctgtgccccctgcccacgcagctcccgtgaggccgacctcaggtgcccggcccggctcgagctgagctcctccactggagacccggggctggctgtgcgccgacaggcaagcgcatctgctaccctagagccggccacctgggtcccccgggaggagagtgagaggggacgctgcgggcctccagccctcccccagacgctcgctggtgatccgaagagctttgcacctccccatttagtaacgccgctctgcggggtcacccggagtgacctcggcacgcaggtgtggtgggggaggttgcagtcctgcagccccagggtacacacacacccctcattaaagctgggcggtgtgcctctctcctcccctccgtcctgcccaccagcctccgaggcctccttttgtgaccgtttcctggctttgtcccctcctggccgaacgagggcacacaagttaagtgtgttaacaacaacagcaataataatagtgtccaacactcatactgtactcggtgctgtggcttgtgttttcatctattattgtcattgttgcgaagagtttttgcagggatggggtctcactatgcggcctctaccctctcactatgttggaattcgaggctggtcttgaattcccgggatgcctctgcgcttcagttttctcctgtctgaaatgcaggtcatccccagctcctacccacagcgctgttgataagaaaattgatatgtataatgcatatactaatgtacattataatattatatctaagataattattttagatatgatatatactatcctatattatatattaagtgatatatgtagtatatatcttttgtataatatatatacttatatgttatttttaaagtaaattcaattaagaaaatatatactgaaagaacatataaaaattaatttacacttcaaagattgttcagttgacaatgtaacccacccaccatcacactccatccttgggccaaaaaaggtgaaaagaaaaacagaaggaaaaaagtgttaacattaaactgatttgctttatctggaacgagttagattataaactagtagaccaaaatctcagcctttaatagtcatcctgatgagttaaccaaccttcgcaggaaaggtggaaatgttttcactcctgatttttatttttttattgttgtttgtttgtttgtttgttttagacggattctcactttgtcacccaggctggagtgcagtggcccgatctcggctcactgcaacctccacctcccgggttcaagtaattctcctgcctcagcttcctgagtaaagtgctgattacaggtgtgaaccaccgcacccagcccactcctgttttttttttattttgtttttaagacagggtctcactctgacatgcaggctggagtgcaatgacacagtcacggctcactgcagccttgacttcctgggttcaagagatcctcccacctcagccttccaagtagctgggatcacaggtgcatgccactgggctgactaccttttaagttttttgtagagatgggatctcactatgttgcccaggttggtctcaaacttctcgcctcaagctatcctcttggcctcggcctcccaacgtgctgggtgggattacaggtgtgagccatctagccctttgctcctgttttaagacagtaatgctattttctttctattgcaccatgtatacgttgaacaaatattgttaaataaaagaatggatgaaaacacaagccataccaccaagcatagtgaatgcttaacaattattattattgttgttgacaaatgcgcttacagcagttactatgggccaggtactgttctggggctttgtatacccttgcagtaatctcattaaatccttatgttctacctatgacataggaactattatttcccgaggcacagacaggccacacgtgctaagtcttatcgccgtctctgacctgctcacacgcagcacaaaaccttgctgggattctctgtgacatgaaatatttcacgcatatcccccaaatataatgagtattcatg[135 bp omitted]aaccctgtctctactaaaaatacaaaaaattagctgggtgtggtggcgagcacctgtggtcccagctactcaggaggctgaggcaggagaaccgcttgaacctgggaggcggaagttgcggtgagccgagatggcgccagggctctccagcctgggtggcagagggagactctgtctcaaaaaaaaaaaaagaattctcactgcaaaaaaaaaaaaagaaaaaaagcatgtgaggtaatgcatatgttaattatacagcttgatgtagctattttccaatctgtgtgtgtatgtgtatatctatataaacatcatgtgagccagacatggtgggacacgtctagtctaggaggctgtcatgtcatgtctgtctaggaggctgaggcatttctcgaggccaggaattcaagagctggagatgcactggtgaaaaacacgcatggcactccagcctgggcaacgtggcgggaccctgtctttaaaaacaatagaaaaatcatgttgtacacaacaattgtatacattctttatttgtcaaggtggaacaaaaaaaaaataataagagcggaaagaacaacaacaataacaaaagagtgcttttgcaggtgcgcccagagctgtgaaaaacgtgagttgccaatgcacacatccccagctgaggctgaagaaagcgatgctccgccttttcgtgtcagccgctcctacaaacaagcgtctcttttttttatgttggtgctgcgattttcacatttttgtggtttttgttggtgattctgcaggtttgtgctttttgttggtgattctacacttcagctcccacgcacagcgctgaacagggtccccttcagtgcttaggaatgttctgcagtgcctcacatagaaaatctggcctggcacgggggctcatgcttgtaatcccagcactttgggaggccgaggcaggcagagcacttgaggtcaggcatttgagaccagcctggccaacatgatgaaaccccatctctactaaaaatacaaaaattagctgggcatggtggtgcacgactgtaatcccagctactcgggaggctgaggcagga[134 bp omitted]gagagagagagggaaagaaagaaaaagaaagaaagaaagagtccatgtgtgtcagatgaacttcattcaggtatgagctgtactcctgctggcggtgagttcaatgacaatgaatcaacaacgtgtctgtaaaagatgtctttaaacagaaaggcaaagtcagtgaggtattgattgtttgatgaagatgttgtaaccagcggcctgcaggaatctaaccctgtatttcccccagtggcaatggcttggtatttgccagtttggtgttctcagcaacttcaaggaagatagccaccatgaataaggagaatcgagtgtgtcgagtgaaatgaaacatatcatcaggactattttcaccttgtttgcatttacttttgtaaaaatagaaacacacagtttggcagacaacatcggggattacagatgccaccgaatcagctatggatctctctagaagtctgcaggtcacaggatgagagttattacattctccatcccctgaagctgttccccagacctcaccctctcctgtgtggatcaccatcccagcttatcagcttcttcctggcctcccctctcgcctctggactgccccgtctgacacacaaaggttctccctccttccctcccacccctccctcctccttccctcctttctttctctttctcttttcttttccttttctttcttttctttctttctctttctctttctttcttttccttccttcttccctttcttcctttctgtctttcttctttctttctctctctctttctcctttcctgtcctccttccttccctccctccctcccttccttccgtctttccgtccctcccttccctttcttttttgaggcagggtctcactccatcacccaggttggaatgcagtggtgcaatcacagctctctgcagccttgacctcccatacttaagtgatcctcttgcctcagcctcccaagtaactgggactacaggtgtgcaccatcctccccagctaattttagaattttctatagatacaggctctcactatgttgcccaggctagtttcaaattcctggattcaagtgatcctcctgcctcagcttccaaaaattctggtattacaggcatgagccaccacaccggccatcattctaacactcacttctggcccaggccctctcttcctcagtagcctcccatggctccctattgctcttgggatagagttcacactcccccgcctggcctccgagcccttctggagctgcacctgttgcaacttatttccacccggctcatctcacccaacacccaggcaatggaagaactcggaatgtccgagcacactggactctctctctgtttctcaggaaacgtgtgtggaatgaggagacggatggatggccgaacatggcaggtttgtaatggcttcagaaaccccatgtgattaataattatagccagcatttactgaacatattaccagccccagtgctaatcctcccagcaccctggggaggtggccctgttattagctcggcttcatcattgaggaaagtgagactcacaaagactaagcctcctgcccggtgtctcactatagatcagcagcaggagggactcaaacgccaatcaacccggcagtgcacaccctcggcctctctgctattcgtagatgtttgtgggccaggagccaggggcaggtgtaggccaaggttgctgacttctcttctttccattcaaacacaacacacatttcctggggactttgtatgcagagccctgagctgaggctgggtgctgggagaccacagacagactctgtccctgctccggaggtgcccagaaggttctgtgaaccaggatacagccgccaagaagcaaggtgtgcctcttccaaaggcgaccaagaggggcctagaagtggctctgagccaacctgacaggaaagttggcaggtgaggaaggggttcagagacctggcggataagtaaattaacagtagcaagagaggccaggccagtggtgactgggattcaaattaaaacaagatcgattaaataatgattgagggccaggtgtggtggctcatgcctgtcatcccagcactttgggaggctgaggcgggtggatcacctgaggtcaggagttctagatcagtctggccaatatggcgaaaacctgtctctactaaagatacaaaaactatccgggcgtgctggtacgcacctgaagtcccagctactcgggaggctgaggcaggagaatcgcttgaaaccaggaggcagaggttgcagtgagccgagatcgtgccactgcactccagcatgggcaacagagcgagccgccgtctcaaaataaataaattaatttaatttaattaacaataataaataacaatggatacctacctgctaccacgccggactcaagcgttgctgcagcatctgggacacacctcaaagcgaagccgactccagccctcgggaggatctgcagagacaggaagcagatctgcgcctgcctaggacatggggggcaggaggcaagtactggggggctatggctaaggggtgcaatgtttcttttgggggtgatgaaaaacgttttaaaattgtgttaggccgggcgcagtggctcacgcctgtaatcccagagctttggcgggtcgaagtgggcggatcacaaggtcaggagttcgagaccagcctgtccaacacggtaaaaccccgtctctactaaaactacataaaattagctgggtgtggtggtgggcgcctgtaatcccagctacttgggaagctgaggcaggagaatcgcttgaacccgggaggcggaggttgcagtgagccgagactgtgccacagcattccagcctgggcaacagagcgagactccatctcaaaaaaaaaaaaaaaacaaaaagaaaacaaaaattagccaggcgtggccgtgcacacctgtaatcccagctactcaggaggctgaggcgggaaaaacgcttgaacctgggaagcggaggttgcagtgtgccaagatcacaccagtgaactccagccggggcaacatagtaagaccctgtccaaaaaaaaaagattgtgttgatgtttgcacaaactctaggactataccagaaaccattgatttgtctactttacacggtgaattttatggcatatgaattacatctcaataatgccagtaaaaaaaatttggcctatagccaggcatggtggccagtgcctgtaatcccagatactcgagagactgaggcaggagaatcacttgagaccaggagttggaggctgcagtgagcccagactgtgccactgcactccagcctgggcaacacagagaaactctgtctcaaaaaaaaaaaaaaaaaaattggaacctgcattttagtgagtgagggaccagagcaaacacagcctgtgagatgcccagatcattttaaattttatttatctttttgaagcaggatctcactctgtcacccaggctggagtgcggtggcatgatcagagctcactgcagccctgacctcccaggcttaagtgatcttcctacctcagcctcctgagtagctgggactacacatacatgccaccatgctcggctgattttttttttggtaaagacaggcgaactctcactgtgttgcccaggctggtcttgacctcctgtgctcaagcgatcctcctgccttggcctcgcaaagtgtgctgggattacaggtgtgagctaccacatcaggcctatttttaacttttaacaccccctcctgtatagaagaactattttcaataaccatcatgtaataatcacctgcatctttttcttgactgctgggggggtttcttcctttttttttttttaattaatagactttattttttagagcagttttaggttcacagcaatattgagcagaaggtacaaagatcttttttttgagacagagtctcgctctgtcacccagtctggagtgcaatggcgcgatctcggctcactgcagcctccatctccccggttcaagtgattcttgtgcctcagcctcccgagtagctgggattagaggcatgtgccaccatgcctggctaatttttgtatttttagtagagacggggttttgtcatgttggccaggctagtctcgacctcctgacctcaggtgatctgcctacctcagcctcccaatgtgctggaattacacgcatgagccaccgtgcccggccagaaggtacaaagttcttctatactccctgccctgcccccactgcctcccccactatcaacatccccaccagggtggtgcatgggacacaccatcatcacccacagtccacagtgtacatgagggctcgctcccggttcatgacgttgtatgttctgtggctttagacgaatgtataatgacatgtccccaccactatagtatcagacagagtatcatagtttcactgccctaaatatcccctgggctgcacctcctcacccctctctccctcctagctcctggcaaccaccgatctttttcctgtctctgtagtttcctcttttccagaacctcgtattgttggaatcaaacagtaagcagccttttcagattagcttctttcacttagaaacatgcgtttaagttctcgccatgtctttttatggcttggtagctcttttttttttctttcagtaaaacctttcattgtcatctcatttctttttattgcttaataatattccattgtatggatggaccacggcttatccattcacatattgaaggacatcttggttgctttctttctttttttttctttttgagacggagtctcactctgtcgcccagactgaagtgcagtggtgcgatctcagctcactgcaacctccacctcccagattcaagcgattctcctgcctcccgagtagctgggattacagccatgcaccgctatgcccggctgatttttgtatttttagtagagatggagtttcaccag[137 bp omitted]gtagacattcacatgtgggtttttgtgtggacataggttttcaactcatttgagtaaataccaataagagtgattgctgaattctggtttatttatttatgtatttttttttgacatggagtcttgctctgtcacccaggctggagtgcagtggcgcggtctcaggtcactgcagcctctgcctcctggattcaagcaattctcctgcctcagcctctagagtagctgggattgcagcacatgccaccacacccggctaacttctgtatttttagtagaggcggttttgccat[243 bp omitted]tctactaaaaatagaaaaaattagccaggcgtggtggcgcatgcctgtaatcccagctactagggaggctgaggcaggagaatcgcttgagcccaggaggcagaggttgtggtgagctgaggtcgcaccattgcactgcagcctgggcgacaagagtaagactccatctcaaaaataataatatatatatataatttttgtatattatatataatttttgtatattatatatatgtatagtgtttttgagggagacatatttaatcattgaccttgtttacaattgctgcacttggtgacactgaaaagcagaccaagctgggcacagcggctcacacctgtaatcccagcactttgggaggctaagacaagaggatcacttgagcccaggagttcgagaccagcctgggcaatatagtgagtacccatctctatgaaaaaaaacatcgtaataaaatttagaaattagaaagaaaagcagaccaaacttttggttggtcattttattgttttcacctcctctatagccaaaacctcccttattgcctgcgtctggagcaggccagttctgctacctgtccaccacctggtaagcccctatagggagaccccattcacacccatcagagaggaagaaattgggaagtggttgaggacatggggaagcagggagctggaggcattgctggtcaagggaggggggtagactggtgggggagatggaggctgtagcggggaaatgggtctgaggcgtcctcttctgggtgtacacccctgagagatcttcccacatgtcctttgccacatcatgtgtgtgatgggaacggaaggcagtcgggaagcgccagacagcttctgtttgtctatctaagtctcctctctgttggggtgacaccctctgcctggaaggcatgcagccaactggactccacctggcttctctttgggttcagtcaacgggagacttcagcagatgatgcgaaggtgtgaggacaggtgctatgctgtccagctctctctccactgggctgcagtgtggcggggcgagggctaatgatggccatgctatgagtcagctggtgccatccacgccactctctgcaactgaaatttgaaaattataagtaattctaagaaaacaaagatatatcatcacattgagtgatgatggagactagacacgtggagaaattgcaaaggatatgcctttgacaaatgtcagcctttatttatttatttatttatttgagacagggtcttgctctgttgctcaggcaggagtacagtggtgcaattagagctcactgcagcttcgacctcgggtgttcaagtaatcctcccacctcagcctcccgtgtagctgggactacaggtgcattccaccaacaaccacacctacctaccttccttccttccttccttccttcctctctctctctctctctttctttctttctttctttctctttcttgttttagagatggcgtctcactatgttgctcaggctggtctcaaacttctggcctcaagcaatcctcctgccttttccttgcaaaatgctggtattacaggcatgagccaccacacctgactgccagttattattatttaacagtgaaacaacaatagtggggtggctaaaaggataaactctagagccaggctatctggctttaccccccatccctgccacttactggccttgggcaaacatctctgcctctctgtgcctccatttcctcatctgtaaaatggggataataacagtatatatcacctaggcttgttatagaaattaaatgggttaatacatgtggattagcttctactgctgaagttaccttcaaaacgtagctgctcaaaactacacccatttctcatcatttctctgggttaggaggctggacccagctcagccaggtcctctgtttcagggactctcataagcctgccatcaaggcatcagctaggctgaggtctcatctgaaggctcaactggaaagatctgcttccggactcactcctgtcttggctagagttggtttctcacaggctattggactgggggtctctgttcctcacaggctgttggatagagatcactctcagttccttaccccgtgggctgctctatagggcaattcccagcatggcagctggccccatcaaagccaggaagccaagccaaaaagagaaagtgggggtgatggtgggaagagaaagagaaacaagacaggaatcatagtcttttgtaacctaatcttgagagtgacatcccatcactgttcccctattctattaaaaatcactatgtccagctcaaattcagaggaaggggattactcaaaagtgtgagcactgggaggcagggaccactgggggccttttcagaagctgcccactgctacatataaaagacttagggccaggtatggtggctcatgcctgcaatcccagaactttgggaggccaaggttggaggactgcttgaatccaggagttcaagactagcctgagcaacatagtgagacattgtctctactaaaaaaattttaaaattagctgggtatggtggtgcatgcctgtagtcccagttacttggaaggctaaggtgggaggattgcttgagcccagaagtttgaggctgtagtgagctgtgatctgtgattgcatcactgcactccagcctggacaacagagtgagattctgtctctggaaaaaaaaaatttatatatatatatatatatatatttctatatatatttttttatatatttctatatatatatttctatatatatatatatatatatatatatatatatatatatatgttgaagtcctaaccctcagtaccacagaatgtggccttatttggaaatcgggtcgttttgatgaaattagttaagatgaggctgtactggagaggaggagtcctactccaatatgactgctattcatatacacaagggagatttggacacagattcccacatagggaggatgcctgtgccgatgaaggccgaggctgaggtgatgcagccacaggccaagggatgccaagggtggctggtgacaccctgggcaacaaagtgagaccccgtctctacaaaacatgaaaacattagccgggcatggtggtatctgcccgtagtctcagctactcaggaggctgaagtgggaggatcacttgagcccaggaggttgaggtcgcagtgagccaagatcgcagtgctgcactccaacctgggtgacagagctagaccctgtctcaaacaaacaaacaaacagattgctggcaaccactggaagctagggagaggcaaggaagcactcccacagcaaggctgttcaacctgcagcctgcaggccacatgtggcccaggacaattttgaacgtggcccaacacaaattggtaaactttcttaaaacattatgagatttttctttttgcatttttgcatttatttatttattagttcatccataattgttggtgttagtgtatttcatgtgtggcccaagacaattcttccaatgtggcccaaggaagccgcaatcttggacacccctcccatacaggcttcagacggagtatggtcttgctgacctcttgatctcagacttccagagccctgggacagcacccttctgtgggtttttttttgttgtcgttgttgttgtttttgtacaaagtttcactcttgttgtccaggctggagtacaatggcacgatcttggctcactgtaacctccgcctcctggggtcaagtgattctcctgcctgagcctcccgagtagctgggactacaggcgcccgccaccacgc[176 bp omitted]atcttatttattattattattattttagagatggcagggtctcactttgttgcctaggctggtctcaaactctaggctcaagcgatcctcttgtctcagcctcccaaagcgctgggattccaggcctgagccaccgctccccgcctgaacttggaacattaattctacctggggtaaatctgcacctagagcagcgtctgactgaagggctgggagcggggatgtgagcacccggggaacaggggtcttgaggaccctcttagaattgtgcccacagcagggactgatagagagagagatggttgtgggaggggtagggaaggtcgtgggggtgtatgtaaagggaggcctgaaaccaagggtgggaggtcattccaggcaaagagagttgtccgtgagaggccgcagaggagagcgcgtggcctgtgctaggaaccgacagagtgctggagattaaaggagtgaatgatgtgtgtggagtggctggcactggtgagcgggtgaggtaataaatagcagcagggttattatcccactgtcagaaggctggaggctgcccaaccgcttcactcccgcgctccgggtctgtctgcccagggctttctctccctctctctctgtctctgtctctccctctctatctcctctgtctttctgtctctcttcccatctctctgtctctccctccctttctctccctctctcgcactgtctctctgtgtgtctcttcctctctctctctccctctctgccccctctgtctccccctctctgccccctctctcccccctttactgccccctctctctcttcctctctgccccctctgtctccccttctctgccccctctgcctccccctcactgctccctctgtctctccctctctgccccttctctctcccccctctaccccctctctctccccctctctgccccctttctctctccgtctctgccccctctctctctccctctctgcccctctgtctctccctctctgacccctctgtctctctctctctgcccctctgtctctccctctctgtcccctctgtctctcgtgatctgccctctgacctcacgatccccctgacctcgggatctctcgtgatccccctctgacctctctgcccttctgtctctctctctctgcccctctgtctctctctgtctgccccctctgtctctccctctctgcccctctgtctctccctgtctgcccctctgtctctctccctcccactgtgtgtgactttgggtgggtccctctcctctccctggttcctcatctgcttccaagactgccccctccctccctgagcccaaagagccgatgcctggggagggcccagcctggactaaggcccagcggcgggaggagcctgggttggaggccgggagcagtggggcgaacggcagcaaatatttatggagccaggtctgtgccaggctcagggctgggtgtggcgagataagggggccaggggaggcgcccggacttggcctccaacccgcttgccccagggaggccgggagccgggcagggggaggtgcccgggaaggagggctgggcgctggggtcgtgcaggcaggggtccccgtggagcctcgggcccctctggagagtggttcacacttcataggtcagctccagcctggttggtatgaagccttctcccacgaagaagccccgagcactctcgctgcggtggcacctcccggctgtccccggcttccccttgggcaccagtctgtgttttgttaatagcacctgaggtggaaacagatgggcttcaaggaagcaagtcacatggaattggacccgaatgcagattatcaaataagtatctgtgtgtctacactgatacaaagaaatacgaggatgaggccgggagtgttggctcacgcctgtaatcccagcactttgagaggccgaggcgggagcatcacctgaggtcaggagttccagaccagcctggccaacatagtgagatccctgtctctactaaaagtacaaaaattagccgggcgtggtgttgcgcgcctgtaatcccagctactcgggaagctgaggcaagagaatcacttgaatccaggaggcggaggttgcaatgagccgagatcgcaccactgcactccaacctgggcgacagagcgagacttgaaagaacgaaagaaagaaggaagggaggaaagaaggaaggaaggaagggagggagggggaaagggaaagaaagaaagaggcagatgagcgagttagcaggaaaaggtgaaggaacacatctctcttacagaataaaatttttttttttgagacagagtcctgctctatcccccaggctggagtgcagtggcacgatcactgcaaccactgcctcctgggttcaagcaattctcctgccgcagcctcccgagtagctgggataacaggtacgcgccaatgtgcccagctaatgtttttttttttttttgacacagagtctcactctgttgcccaggctggagtgcggtggcgcgatctcggctcactgcaagctccgcctccagggttcaagtgattctcctgcctcagcctccccagtagctgggactacaggtgcccgccaccacacctgggtaattgtttatatttttagtagagacaggatttcaccgtgtcagccaggatggtctcagtctcctgacctcgtgatccacccgccttggcctccgacagtgctgggattacaggcgtgagccaccgcgcccggctgtattcttaagaactgtctatctactcccccattctgaagaagggagcttaattcccccacagcccaaatgccccgtgggctgcactcggcggcttgtttacaaagactagatgaatggaaaggaaggggggtcacatacagtggggagagctggcaaacaccacccctgccaggtgaccagggtggtcaagcatgggtgagcagacatgagaacacgcacctcctgataggaggcgaagagaagggattttttttttcatactaaaaaaatttttttggctgggcgtggtggctcatgcctgtaatcccagcactttgggaggccaaggtgggtggatcacctgaggtcaagagttcaagaccaacctggtcaacatggtgaaaccccatctctactaaagattaaaaaattagctgggcatggtggcgcacgcctgtaatcccagctacttgggaggctgaggcaggggaatcgcttgaacctggaaggcggaggtcgtagtgagctgagatcatgctactgcactgcagcctggacaacaagagtaaaactccatctcaatttaaaaaaaatgttttttgaagagaaagggtctcactgggttgcccagaatggttctctaactcctgggttcaagcgatcctccctcctcagcttaccagatagctggaactataggtgtatgccaccaggcctggctaatttttaatttttaatttttttttagaggtggtgtcttgctatgttgcccaggctggtctcaaactcctggcctcaagcaatccacccacctcagcctcccaaagtgctgggattacaggtgtgagccaccttgcttggcccagaggggcattttgtgtgtgtaactgtcgtcctagctacacgggaggctgaggcaggagaaccacttgagcccaggggttggaggttacagtgagccaggatcacaccactgcactcctgcctgggcaacagagcgagactccatctcaaaaaaaagaggtttttttttttttgcgtttttgttatttattgattgatttatgtattagttcatcagctgttagtgtattttatgtgtgacctgagataattcttccaatgtgggccagggaagccacaagattggacacccctgccctgcaggcttcagaggcagtgtggccctgccgacaccttgaccccagacttgcagccccagatccctgggacagcacacttccgtgctctgctttgccaggactgctctaaactgtcaaagtcatcagaacgaggcaagtctgagaaacagtggcagacagtaagagattaaggaggcatgacggtgagacgccatgtggtatcctgggtgggatcctgaatggaaaaaggtcgttcgtgacatctgagtaaagggcagagttttgtgctgtactagtgtttgcttcttggttttgacagacgtgccatggtaatgggagacgagaacatttggggaaattgggtgaggggtctgtagcaagtctactatcactcactgcagctctactatcccgtcttaaatgtttctaaacaaaaaagtttatgtaagaaagaaaaccaggtgggcttatgggtacttttgccacactccccaccaggctattcacacagaagccagggagaatctgtcataccaggagaggggagtttgtgttattcaggtgtatgtctttgtccaaatgtatcaaatggtaacttgggaaatgtggcatttcactgtattttaattttactaatgacaagaagcttaaatatttgatatcttgttatgttatgcatgctaataaaacatcaaacaaaaaagaaaaagttttttaaaaaccaaaaaaaaatgttatgcatgctgaagtgtttaggagtgaactgatatgttgctttgagaattgcaagttgcatagagaaagatgaatatatgagaactctctgtgctttctgttcaattttgctatgaacctacaacttctctaaaaaataaaatgtattaattttataaagatggatgatggatgaatcaatgatggatagatggatggatgatgcatgaatggataggtgaatggatggatggatgatggatggatgaatggatggttggatgaatgggtgaatggatggatggatgatggatggatgaatggatgaatgggtgaatcaattgatgaatgaatagatggatggatgggcagatgggcagatggataaatgaatgaatgaatggatgggtgaatggatagatggataggtgaatggatgatggatgaatgaatagataatggatgatggatgaatgggtggatggatggatggatggatggatggatggatggatggatgaatgggtggctaaatggatagatgcatagatggatggatgatggatggataggtgaatggatggtggatgaatgggtggatgggtgaatgaatggatggatggttgggtaaatggttggatgagtgagtagatagatggatggatgatggatgagtgaatggataaatagatgggtaaatgatggatggatgggtggatgaatagatgaatagatggatggattatggatggatgtatagatggatggctgatggataaatgggtgaatggatgaatggataatggatggatggatgggtgtatggaaggatggatggatgtgggaatggatgggttcatggatggatggatgaatgtagagaatgggtacatagacattcgctgcacaattatttttatttccttatgtttttatatttttataatgacacgctaaaaggaaaaaggaacgtcgaatcctgtcagcctctgcatgaattcctccaagatttccatctcattttgatcagaaattgggttctcatgactctctacccaatctggtaccccatcacctccttgatctcctctcccattgctccctcctttgctcactcctctccagccacattggcccctctgctccttgaacactccagctatgtcccctcctcagaacttttgcatcagatgtgcccttcctctgggacacatcccagttatctgcactgctctctcgttcagctcttggcctacacaactgaagttcctacatgccctgtcttgcattgtctttctccatagcatttctctttctctaagacgttttataatttactttcttgctatgttttcttgcctgacttccctcactagaatggaagccccacctaaagagggattcatctattttgttaaccaatgaataagctgcaccttggacagtgcctggcacatagtagaggctcagtaatgagttttaggatgagtgaatggaagactgaatgaggccgggcgcagtggctcacgcctttaatcccagcacttttggaggctgaggcggacagatcacctgaggtcaggagttcgagaacagcctggccaacatggtgaaacctcatctctactaaaaataaaaaaattagccgggagtggtggcacatgcctgtaatcttagctactcgggaagctgaggcatgagaatcgcttgaagccaggaggcagaggttgcagtgagctgagatcgtgccactgtactccagcctgggtgacagagtgagactccgtctccaaaaaaaaaaaaaaaaaaaaaaaacttaatgaatgaggtaaggatgaagcattgtgtaaagtttaaaagcccaggctttgcagtcacaatgcctgggatcaaatctggcatggtacttactagctgtgtggccttggctaattcatttcacatttctgtacttgagttttctcaggaaagcagggcctactgggaacctcataatcgctagtgggctgtaaatggtacagccactttgggaaacagtctggcactttcttaaaaagtgaatcacacacttcccacacagcctagcaattctgctcctagaaatctgccccaaagaaatgaaaacatatgcccacacaaagacctgttgctgggcgcagtggctcaggcctataatcccagcactttgggaggctgaggcaggtggatcaccagaggtcaggagtttgagactagcgtggccaacatggtgaaaccccgtctccactaaaaatgcaaaaattagctgggtgtggtggtgtgcccctgtaatccctgctactcgggaggctgaggtgggagagttgcttgaacctcagaggcagaggctgcagtgagccgagactgcacaccactgcactccagcctgggcaacagagcaagatcccgtcaaaaaaaaaaaaaaagaaaaaaaacaaaggccgggcatggtggctcatgcctgtaatcccagcactttttggaggacgaggcaggcagatcatgaggtcaagagattgagaccatcctggctgacagggtgaaaccctgtctctactaaaaatacaaaaattagctgggtgtggtggctggtgcctgcagtcccagctactcaggaggctgaggcaggagaatggcatgaacccgggaggcggagcttgcagtgagcagagatcatgccactgcactccagcctgggcaacagagcgagactccgtctctaaacaaaaaaaaaagacttgtacatgcatgttcacagcagcattacttaaacagccaaagagtagaaacaatacaaacacccatcaacggatgagaggataaacaatgtgtggtgtatccatacagtggaatattattcagctgtaaaaaaggaatgaagagggtgggtgcaatggctcatgcctttgatcccagcagtttgggagatcaaggtgggaggattgcttgagcctaggagttgaagatcagctcgggcaacatagtgagacccccatctctacaagaaataaaaatattatccaggtgtcatgatgcaccctgtggtcccagctgctcaggaaactggggagagatggatcacttgaggttgaggctgcagtgagccatgatagcaccactggactctagcctgggcaacaaagtgaggccttctctcaataacagcaacaacaacaactaaaaagcaattaagtactgaactgacacaatttacaatgtgaatagaccttgaagacattatgctaagaggaggaaggcagtcaccaaagctacatatggcatattccatttatatgaaatgtctagaataggttcatccatagagacaaaatagattcgtggttgcccagagctgagggtgggaatggaaaatgactattaacaggcacagaatgtctttttgaggtgatcaaaatattctttttaaaatttttaattaattcatcaatttatttattattattattattttttagagacaggatcttgttctgtggccttggctggagttcagtggtgtgatcatagctcactgcagccttcaactcatatagctcactgcagccttcaactcctgggctcaagacaccctcccacctccgtctcccaagtagctgggattacaggcacttgccaccacagccagctaatttttgttcaatgttttgtagcgacagggtcttgctttgttgtccaggctggtctcaaactcttggctccaagtgctcctgccgcctcagcttcccaaagtgctgggattacagacctgagccaccacacccagcctggaaatattctaaaattgga[134 bp omitted]aaaccccgttcatactaaaaatacaaaaaaaaattagtgaggcgtagtggcaggcacctgtaatcccagctacttgggtggctaaggcagagaattgcttgaacccaggaggcggaggttgcagtgaaccgagatcaagccactgcacttgagcctgggcaacagagtgagactctgtctaaaaaaaaaaaaaaaattatcgaattgtacgaccaaatggatgaagtctatatgtaaatggtacctcagtaaagctgtttatgaaaaggcaaaacgaaaacagagccaataatagtatctattttatgtggctgttgtgaggattaaatgggctaatctacgtagtacccttgaagcagacatagggtgaat[139 bp omitted]atggagaaaccttgtctctactaaaaatacaaaattagccgggcatggtggtgcatgcctgtaaccccagctactcgggaggctgaggctggagaagcacttgaacccaggaggcggaggttgcggtgagccgagatcgtgccattgcactccagcctgggcaacaagagtgaactccgtctcaaaaaacaaacaaacaagcaaaaacaaacaaatgtggttgcgatcgtacgtgtaaagtgttcagcaagtgaaagacaaatggcaggtcgtgttccctacataaccacaactccttcaataatcaccgtcatttggtgactttatcattctctgcatctgtcccacgcatctggcctcagttttccacctgcgcaatgaaaaagctgggctctatctccaaggccgtcttctctttgtcaattctgtatttggttctgaaaatgtttctcttcgaggcggcagatctgcaatgagaagggtgggcaaacccatagagccgaggtggggcccgcgggtcctggagaccaacatgtgtgtaggaaggggcctgaaagtgggctgtgtggtgggagctgacggggagggtaagattggcctgggtaagggttcgaggaccaggtctgccaatttgtaaccgtgatatcttggacaaggaacttcctctctgcatccagaaaatggggagggtgtttcctgcctccccgtggagcagtgaggattcattgagatcatgtatataccagccagggagaataatagctaaaagtaccaacagcaacaaccaacagcaacaactttttctctccatttttttttttttttttttttttttttagctctgtcacccaggctggagtgcagtggcatgatcttgactcactgcaacctccacctcccaggttcaagcaattctcctgccttagcctccccagtagctgggattacaggcatacgacaccatgcttggctaatttttgtatttttagtagagatggggttttaccatgttggctaggctggcctcgaactcctgacctcagatgatccacccacatcagcctcccaaagtgctgggattacaggtgtgagccactgcgcccggccaacagcaacaactacttaccaggcccaagcactgtcttcagccctttccactaagtaacccatttaatatgcaaggctcatttcatagtagtgattactgaagcaggacaaatggcttctttgctttaagccccaatctggcccttctataagtagagctatgtaattccctcgtttgatgggttttgtccatgacattgtatggataaggtgtctggccatggtaggctctcactaaataggagcccacattaagatatggtaatagggagccactgatggttcctgaggagggagtagctttgatgtaataaaagcagacttcagcctcccatctccccaacacttgacgcttggttatagtttctcataggatctagttctttggggaaccagtctcatttggtaaccctaatctattcgtgccaatattgggttattgttcatctcctgagctggatggttggtgtcaaaagagtgcctaaggggtgtcatcaaatactagccccaacatccagcactgggcttaaactcagtgataaacagttgggacaggccaggtacagtagctcacgactgtaatgccagcactttgggaggctgagtggggaggatcgcttgaggccgggagttggaaaccagcctgggcaacatagtg[131 bp omitted]aaacctcatctctactaaaaatacaaaaaattagctaggcatggtggtgggtgcctgtaatcccagctacttgggaggctgaggcagagaattgcttgaacccgggaagcagaggttgcactgagctgagatcccgccactgcactccagcctggcgacagagcgagactctgtcttaaaataaaataaaataaaataaaataaaataaaataaaataaaataaaataaataaaataataaaataaaataaaataataaaataaaaattagccaggcatggtgatacaaatttgtagtcccagctactccagaggctgaggcaggaggatcacttgagcccaagagatggaggctgcagtgagctatgattgcgccactgcactccagcctgggcaaaaaagtgagaccgtttcaaaaaaaaaaaaaaaatcaaacaaactaatccatacaagccggcacagtgctaagggctcagccaagatgtgtgaaatcattgaaggtggaattatttgaagctttcggtgtcatcctctcccaccttgaccctcaatcaccatctttcttgcttctctgcctcctttgatccatctagtattgttgacgcactggggaaacagcttccctctcagagcttcagtttgttgtcctggaaaagggggaggctctgcccctttcttgctgtttcttgtgggtgtgcaggtacctaagtagtcaacgtcttttttttttttttttttttttttgagatggagtctcgctctgtcgcccaggctgcagtgcagtgttgcaatctcagctcactgcaacctccacctcctgggttcaagcaattctcctgtctc[133 bp omitted]tcagcctcccaaagtgctgggattataggcataaaccactgcaccccgcccatcattatttgcatagggcaagagagaaccatcgaaggtgctgggggaaagcaggatgtcaagagaaggaaagagaaaggtgtttaaggaagattagctgagagatatccctcttccttccactcctggaacctaaataaacgggtaaaaagaaaacaactgggccaggcgcggtggctcatgcctgtaatcccagcactttgggaggctgaggtgggtggatcatgaggtcaggtggtcacgagatcaggagttcaagaccagcctggccaatatggtgaaactccatctctactaaaaacacaaaaattagctgggtgcggtggcaggcgcctgtaatcccagctactcgggaggctaaggcaggagaattgcttgaacctgggaggcggaggttgcagtgagctgagatcgtgccactgcactccagcctgggtgacagtgcaagactccatctcgaaaaaaaaaaaaccaaaaaaacaaaaaaccaaaaaaacccaacaacttgaagatgtgtagaaattgaaacttcccacctcacctccaattacctgcagtttctaaaatatgtagtaatggccaggtgcagtggctcatgctggtaatcccagcactttgggaggctgtggcaggaggcttccttgatcccaggagtccaagaccagcctgggcaacatagggagacaccatctccacaaaaaatttaaaaattagtcaagcatggccgggcacagtggctcactcctgtaatcccagcactttgggaggccgaagcaggaggatcacgaggtcaggagatcgagactatcctggctaacacggtgaaacccagtctctactaaaaatacaaaaaatcagccgggtgtggtggcgggtgcctgtagtcccagctactcgggaggctgaggcaggagaatggcgtgaacctgggaggtggagcttgcagtgagaggagatcacgccaccgcactctagcctgggtgacagagcgagactccgtctcaaaagaataaataaataaataaataaaataaaaattagtcaagcatgatggtgcacacctgtagtcccagctacttgggaggctgagaagagagaatcccttgagccaggaagtcgaggctgcagtgagctgtgatcgcaccactgcactccagcctgggcaatagagcaagatcctgtgtccaaaaaaaaaaaaaaaaatcctgtagtacctacctcctagcctttgcccctgttttttctttgtctggtgttgtcttctcacagatgtttctctctcatacctggttccctccatcttcattcaaatcaaacatcgcctggccagagaagccccaacccccagtcctgctctgccatcatactgtctggtggtttactcttggtagcccttatacctggtgctatattgcatcctgctaggacttttttcaatgatgtaatgttctagatctgtcctgtccaatatggcagccaccag[136 bp omitted]tgtggtgaaacccgtctctactaaaaatacaaaaaattagttggttgtggtagcaggctcctgtaatcccagctactcgggaggctgaggcaggagaatcccttgaacctgggaggtggaggttgcagtgagccaaggtcgtgccattgtactccagcctgggcgacaagagtgaaactctctctctctctcaaaaaaaaaaaaagagtgaagagtgtgactgaggaaccgaacttttacatttatttcatcttaatgtctttacatttccatattctaaatttaaacggaaatagccacgtgtgtctgctggatatcatattggacagtgaagatgtagaatatcccatcatcacaaaaagttctcccagactgggcaagatagcaagactccgtctctgcaagaaatgaaacaatcagctgggtgtggtggcatgcacctgtagtcctagctccttgagaggctaagaggattgcttgggtctgggagtttgagactgcagtgagctatgactgcaccacggcactgcagcttgggcaacagagtgagggaagaaagattatggaaacttttctgagaaaaaaaaaaagttatgttggacaatgcagggctagaattccagctctttcagaggaaggtattggactcctcctcagtgcctagtaccaccgctgacacagagtaagggtgtggtagagattgactgagtaaggcgcggagcttccacagggcagtggtgaggataatcgcgcggagcttccacagggcagcggtgacgatgatctatcttctcacattcctgtttcttctcaacccagccttcaccggcttcttgcttggttgagggccacatattttctgatgcatctgtgtccttcctgctctgaacccaagttcagagttggctggacaaatcctgactcgccccagcgcccccagcctgccccacctccacagaacacctcgctctcttggatttcacgaactcacatttattcacagacagacaaagggacaaggacagacctttgctcactggggacccccagggtctggcagttccaaagaggtgatggtgtccagtgtgtgaaacgggggacagggaggcgggggcgtccccaccagtctccatccctctggccaactgtccgccgcctttttttccaagtcgtcctgccttaagacacatgttggggtgagcggttcctaaccagcatcaggggttctgggggcgggcgatgggggaggaaggggcagtccagggccccccactccttagtgtcaagggcgtgaaggggacgggtgggtagacagaggaggtggctccttcaacttccctcctccattctgcaaaccggggagctcaggcggagcggcggagggcagggcggcgaaggtcaggaggccaggccccccagcccgcgcaggtgagccttgctgtctacctcttcctcctccatctcgaaggctgagtggtcttggctgtcgaaacaggaggcgctgaggaagacagggggagccggcggggactggggtggggtccccggagagggcggctcttccttaatgtttgcgaggggcagcgggagcccttcttcctcctgctcggccttcaggggcggcgggggcggtggcggcgacgtcggggcctgggcctgcagtgcctgcagcgcggcggccctctccagctctgcgcggtggcagcgctggtggcgcaggaggctgtaggcgcgcgagaagcggcgcgggcagcgggggcacgggtgcggggctgggccccccgcgtgcacctgtgcgtggcgcgccaggtcggccaggcgcttgaactcccgctggcagcgcacgcactggaaggggcgcgctcccgagtgggtcaccccgtgctgccgcaggtgcgcccggcgcctgaaacctttgccgcactctgggcaccagaagcggggctccccggcggggggccgagccggggcggcgtcgcctccgttctgcccttctcccccttccgaggcacccccgcactccgccccctcgcccccctccggccccttggctgagttccgtgcacccgaggccttgtcgtccttcttgcccgccgcgggcagcggggccagcaggctgagggggccgtggacgcggcggtgctggcggaggtaggaggcgaggcggaaggccaggccgcagtctgggcacacgaaagggcggtcggtggagtggaccagccggtggcgcgacagggaccagggcctggcgaaggccttgaggcagatggagcactggtgtcgcttggggcgtggcgggggccccccttccccttcctgttcgccctcggggcgcagacacgggtgcgccttgagctcgcccttggtggcgaaggcttcgcggcagcgcagacacagcagcgtccagtctgcctggagcaggacctgtttctcctcctgccgcccggccgccagcgccagctcggccctcagctctgctgccccggcctcggcctcctccgactccgactcccggggctccgcggcgctggtgggcgcagccagcgtggaaggctcccccgcaggccacgtctcaggccacgctgcgaccgcctcctcctccgtggcccctgctgcagcggtggtgggcggctccgagccctcgtcctgcgggccccagctgggttcggccgtctccttggccaccctctcgatggccagctcgacctcgccgcccgcgtgctcctgagccaggtggcgcctgagctgggccggttctgggaaggtgcgggggcaggcggcgcagcgcagcgggggctggggcccgtggccgcgcaggtggcgggaaaggtgggccggccggcggaaggccttggggcacagcgggcaggcgtggggccggagccccgagtggctcagccggtgccgggagaggtagtaggggaaacggaagaggcggccgcaggtggggcagggcaggggcgccctaggggctccagcgccccccctgccacggccacggccccgaccacggcctcggccacggccccggcctcggccacggtgaggtgggctgccctgggcgggtggaggaggctgcggatccatgcctgtggggagagaggggagagatgggaagcggggcagagataaaaagaggtgcgtggggtgtggcagaaagagaagcagagacagtcagagatggagaggcagagagggtcaggtatttagccaggagagagatatgagacagagacaaagatgagagacaccgaggggaggccagagatggagagacaggaggagagagatcagagacagagcgacagagcagggaatagagacaggagaaggcagagatgggagacacagagaagtggggatggacagacagagaccaggagtcgcagaaagacaggatggtgaaaggcagagcagagaagagacagaggagagtgaggaacacccagcagagagacagagacacagagaagaggaaacaaagagacttggagaaccagaggcagagatagtgcaagagcagagatcagaagagcagtggcgggttgggggccggagagacagggagacagagacacagagggagtgaactgggcagaggcacggagggggacaaagtcagcgaaccgcttctgctccaggtcccccggccaggctgaacgttttgggaggggctgggacacagcccatggggcctgagtggagggggtgggatttgaagccggtaggccccggaaatagagtgtgttctcagatgccaggggctgggagaggtcggggagtaggagggttcagacttctggtctgagttgggagggggctaggggcccagactcttgggactgatggggatgggagctggggattgagactcctgggtccaggtcatgacggattggggaatctggactctggtatggaggaggtgtggattcctgggtcccggtggaggaggggctggggagggggctgggctcccaggacaagggggaggcgggggctggggacccagctgccgggaatccccagggaggaggcgactgagggccggacccctggactcgggagggaggctggtgggggtcgggggtcccaggtcctagaggggggccgatctcctccgggccaagcctgcagctccccgaaggcatgatcagcagaattggggccgggtcgaggccttgaggatttctcagccctgggcctggggcttggtcctggtcgctggggctgggttcttacctcgcctccttggctcctttcttccttccccacggccggccaaacgcggacggtggtggcggggagggaggggggcctgagcgtggtggggggtggaggaggaggctgggctcggtgtcactgcctaagccttccccccggaaacctggcctttcctcggagcctgaaagaggaaagactggctgggaagccggaagcgggaggacgggggacctggagaggggagggaaggcagcttgcactacagggtcctgtgaggggagggggctgggggcctgtcccccgggctcccagagggcggagggtgctgagggcctggaacactgggtccagctactcccggctccccaacatgcacacacacatattcattcattccttcaacaaatacacatttatcaggtcctgtctgtgccaggcactgtgtcaggccaggggagtggccgggggaggaagatgaatgaatcagtgacagaggcttcaggaagtactggcactctggatcagaacctggctccagccttcccttggctgtctgggtgaaggattctcccacttcgagcctcggtttccccctttgtgaaagcccctgcatatactcattcaaccctaagcgaccaatatttactgaatatctactacgggccagcctgcatatatttgtctacatatacgcatattcactgggaccttagcagccaatgtttactgagcacctactatgggctggtgctgtccttggtgctggagtcacagtggcaaaaaccggagctcactgtctgatggggaaggcagatagatacggatcaatcacgctggagtgcatgtgggggaacgtgtgctccgaggcagggaactgctatgggaatgcagagaacagaaggcactgagctgagctcacactgggaggaggtgattcctgaggtcttcctggaggcagcaatgtttcagctgaaattggcagaatgaaaccaacctggcgacatctcagaaacctattctggagcagaaaaggcattttgcaggagtatacccacagcttgacgctgtttgtttaaggttacattcctgccaaacagtgctaatgagagtgcgagcaaacaggtcctttcatacacggctggggcaagtagaacctggaacattcttaccgagccagcaattccaggaatttattcttcagaggcatctactcggaactgcacaaaataatgtctgcaccaggttaatcattgcagtactgcacatcactgcaaacagctgaaaccaatctaaacacccatctgtaggagagctgagtaataaatcatgactgatccacccagtggaatactaggtgtccatagaaaagaacaaagaagctcaccgtgtgcatatatggtaagtctccaagtgataacctgtagaagagaaaaatggaaggtcaagtacagcctgcagcctgttctgggtttgtgtgtgttctgggattgtgtccagatgaactggaacaagagagaagaaactgaaactggcaacatagtctaacttccaggacagaaatttactacactctatccttgtttttttgtttgtttgtttttttttgttttgttttgttttcttttgagatgagatctccttctgttgcccaggctggctggaggaagtgcagtggtgtgatctcggctcactgcagcctcgacctcccgggctcaagcaatcctcccacctcagcctcctgagtaggtggggctacaggagtgtgccaccatgtctggctaatttttgtatgttttgtagagatggggtctccctatgttgcccaggctgggcttgaactcctgggctcaagcaatccacctgcctcggcctcccaaagtgctggaattacagacattagccactgtgcccggctttttgtactttttgaattcaaaaccgtgtgaatgtgctatatactcaaaaaagtaaaggaggccaagcatggtggctcacgcctgtaatctcagcactttgggaggcccaggtgggcagatcacctgaggccaggagttcaagaccagcctggcccacatggtgaaaccccatctctacaaaaggtacaaaaattagccaggcataatggcacatgcctataatcccagctactcaggaggctgaggcaggagaatggcttgaacctgggaggcagaggttgcagtgcgctgagatcgtgccattgcactccagcctgggcaacagagcaaaactccacctcaaaaaaaaaaaaaaaaaaaaaaagaaaagaaaaaagtaaaggaaaaagaaatacatggggattataaaaataaatgaaatgaaaaataatagcttactcttgtgagcgtattacaaatatgatcccatttactccttgctttatgaagtaggtaccattatttttcccttttacagaggatgaaagtgagatactagaagtttccaaacctagcgagtctcagtaagaagtttcacttcacaaacagataggagaaatgatagtggat[132 bp omitted]tgaaaccgtctctactaaaaatacaaaaattagctgggcatggtggtgcgcgcctgcaatcccagctagtccggaggctgaggcaggagaatcgcttgatcctgggaggcggaagttgcagtgagccgagatcgtgccactgtactccagcctgcgacagggcaagactccgtctcaaataaataaataaataaataaataaataaataaataaataaataaaataggaatggggtctcactctgttgcccaagctagtcttgaattcctgagctcaagcaatccttccacctcagcctccgaaagtgctgggattacaggcattaactaccgtgcccagactaggagcatgctttttaaaagcaccttgtccataatactatattttaaagaatatataccatggaataaaagtctaaaaatgtctgtggtaataataggcaccaaattcaagatataagttatgtttgagataggagaggcaatcagatcttggagggggtggtccgcggggagtcatttgtatccctaatatttcaaagctggtagtcagaatatgggtgtgtgtattttaacatgttttttgtaaaatacacttaaactttataattgtaaccattttaaatcacacagctcaatggcactaagtaaatgttgcacaactatccacgctgtctagttccagaactctttttttttttttttttttgagacagagttacactcttgttgcctaagctggagtgcaatggcgtgatctcggctcaccgcaatctccgcctcctgggttcaagcgattctcctgcctcagtctcccaaatagttgggattacaggcatgtgccaccatgcccagcttattttgtatttttagtagagacagggtttctccat[133 bp omitted]gttccctagcctcatctgaactcctggtctcaagccatcctcccacctgagcctcctaaagtgctaggattacaggcgtatgccaccatgtccagcctagttccagaaccttttcatcagcccaaacaaaccctaagcccattagcagtcattcccacactcccttctatccccagcccctgtcaactaataatcagttttctgtctctatgaatttgcctattctggacatttcatatcaatggaataatcataccatatgtgttcctttgtgactagcttctttcactttgcataaaagtttctcctcctcctccacaaaggacattgcccccctctttttaaaaagtgagacagggtctttctctgtcgcccaggcaggagtgcattggtgcaatcacggctcactgcaacctccaccaccagggctcaagcgattctcccacctcagcctcccagatagctgagactacgggcatgcaccaccacgcctggctgatttttgtttttggtagagatgggatctcgccatgttgcccagtgtggtcttgaactcctgggctcagatgaccagcccacctcggcctcctgaagcactgggattacaggcgtgagccacctcacctggccagcataatgtttctaagcttcatgcgtgccatggcatgagttggttcttcactcctttttgtggctgaatagtattcctctgcgtgagtgcagtcatccctcggtgtccgcaggggattggttccaggactctcctcagattccaaatccctgggtgatcgagtcccttacagcctcctatctgagggtgcagaacccacggatgtggagggccgctgtcacctacattttgtttatccattcatttgttgatggatatttgggttgcatctatctttgggctattgtgaatagtgctgttataaacattggtgtgtaagtttttgtttgaacagctgtttttaattcttttgggtatataccaaggatgtgtgtactattttatcatctatattttgaaggcttgaaagatggatgaggaggagaaataataatgaattcaggaatggaggtgatagaaaagaaaactttaagcagagagcacagcacatggaagggggtttgcgctctgcttccccagcacatggcgggggatggggttgggggtcttgcattagggcataaaggaggccagtgtggcggagagaggccagagctgcacccagcgaccgtgccgggcctccgagtccaggctgagcttggactcattccgagtgcactgagaagccattgaaaaggttttaagcaggagagtcacatgatccgattagtgttttagagaaattcctgtgggacccgcgtggaggccgggccggatgctggggagaccgaggcggggagccgggaggaggggggcgggggcccaggtgctagagggggggcctgggcccctcgacctccggctgggaaggcggctccctgggcagggggcggggcttgtcgctgactggctcagggctggactccccgatgccagtcccaccgtctccccctcctcattggctctcctgcttccagcccccccctctcccgtgcagcctccagcacccagaaatcatatcacctcactcctgagcccaacaccctcccgtccatggctccccatctccctcggaataacacccagagcttccctaatgacccccacgtgcacccccgtcctcaaggccctgcttgcctggaccccggtgcctccctcccttcctacctccctctccgcgttacatcgccctctccgctctgtcccgagttagggcctttgcacttgcggttgccccggcctggaaagccctcccgaggtttgcatccagcttcgcttacgtccctcactcctacagcttcctggagacacctgtcttgtccacccaggctaaaatagcctctcgtcaccctctggccttcaccttgccttaattttcttttttcttttctttttttcttttttctttctttttttttttcagtcagggtctcgctctgtcgcccaggctggcgtgcagtgatgcaatcccagctcactgcaacctccgcctcttgggttcaagcgattctcctgcctcagc[131 bp omitted]gtctcggcctccctaagtgctgggattacagacgtgagccacggcgccggcctttaattttcaacatggtacttatcacgaacacacactaggcaatgtgtgaatgtcccatggattccctatctcccctgccactagaataaaaactccacaagggaaggggcttgttttgcctgtttaacggctctgcccacaggtggctgcccgggacagacaaggggcttaacaagcatttgtggatgaataaaaagggatgaagggtgggaggagtgaggctgttcctgaaaggaagaaggctcgggggcccgggggagactcccgctcaggcaagcgtgcaggacgctggctggctccaaggtctgcacgcaggaatcagctcgccaaacacaggcgtgtgagtcgccggcgtctggctagtaattaatgttttgcaacggttgagatcgtcctcagggtaaaattcccgctcctgtcctctcctcgcttcccaccccccctccaacctcaatcagcgtatctataaaatggggccgctatgtgacgcgttgggtgcagtgtccagtccagcaccgggcgcttgtgagacacggaggaaatgggatgggtccttctcgttaccgccccagaagagaaaggactgtggtgcaggtgaggtgggtgggaacctcagcctcgcgaggtccctattcattactccctggccggcggccatctccatggcaacgctggcgcctttccagtgcgcagctccggggctcagcctgtctctaagccggtctcggagtgggcgggtcttgtccctgggggcggtgcctgcttcgaagtgggcgggccttgtttctcgaaagaagatactttttttctcaaaccagaaagcatgtctggtttttgagtggcggttgcagagtggagaggaatatctctaagatttagctgattttattcccaaaggttgagctttttcaaacaggcaacagtggatctccattcaaaaagtctcccttgagtgctaaactcttacttgttttctcctcccagaatatgtcttcctcctttaaattttcctttctttttctttcttttttaatttatattttaaattttaattaattaatttattttttcagacggacgtctcgctctgtcacccgggctggagtgcagtggcatgttcttgggtcactgcaacctctgccttctaggttcaagcgattctcccgcctcagtctctcgagtagctgggattacaggcgtgcaccaccatgcccagctaattttcgtatttttagtagagacggcatttcaccatattgcccagggtggtcctgaactcaagtgatccgcctgcctcagcctccaaaagtgctgggattacaggcgtgagccaacacgttcggaattattttttatttttgagacggggtcgcactctgtcgcccaggctggagtgcagtggtgcgatcatagctcactgcaacctcgacctcctgagctcaagtgatcctctcagctcagcctcccaagtaactgggactacaggcgtgcaccaccatgccggttttttgtttgtttgtttgttttgtttttggtagagacaggatctcactatgttgcctaggctggtctcgaactcctgagctcaagccatcctcctgcctcagcctctgaaattgctgggattacagacatgagtcaactcgcccagcctaaaatatcttctttgtgaaatataagacacacagagaaaaaatgcacaatacaaacacacaattgaataaataattataaaatgatcgtccgattaagaactagaactttgtcggctatcagcaaccgtggaaacttccaggatatcccctcccgcttaacttgtccagtccactattctgagttttataggacattgttgtccttgcttttttatatggtttactactgacaatgtatccttaacaatattacagtttagttttatgtgcattataatgggtttgctttttttttttttttttttttggagacagggtctccctctgttggccaggctggaatgcagtggaatgatcttagctcactgcaacctccgtccccctaccccaggctccagcgatcctcctgtctcagccccccgagtagctgggcctacaggcacacgccaccacacctggctattttttgtatttttactcgagacggggtcttgccatgttgcccaggctgatctcgaactcctggactcaagcaatcctcctgccttggccttccaaagtgctgggactataggcgtgagccactgcacctggcctcaatgttatgtaaatgaaatcatgctctgtttctggctttttgggtcctgtatctttgtaactttcattcatgatactgtgtttatctgcagctcattcattcttgttgccgtatagtattccactgcataatatgccatcgctaattatccactgtattgctgatgggcgttttggttgtcctgagtttggggttgaaagtattgctgctatgaatgtttttgtatgtctctgggtgcagggggacttgagttagcatttacgcctagcagtagaattcctgcatcacaggatatatgtatgttcaatatttgagaatggca[135 bp omitted]tgaaagcccgtctctactaaaaatacaaaaattagctaggtgtagtggtgcacatctgtaatcccagctacttgggaggctaaggcatgagaatcacttgaacccaggaggtggagtttgctgtgagccgagatcacactattgcactccagtctgggcaacagagtgagcccctatctcaaaaacaaacaaaaaaatcttaaggaactaaaggggaggaaactttgattctcctaaactcctacttaaatgtgtcctccctcagttttctggtcttagtaagaaatgccaccactcaaccatttattcctgatttctcccttcccattacactcacccccaaccaatacacacatgcacacaaccagtcctctgcattcgtactccagagttcatctccaacccacccatttctttgttttgttttattttattatgtttagtacagacagggtcccactatgttgcctaggctggtctcaaactcctgagctcaagtgattctcccgcctcgacctcccaaagtgctggggttacaggcgtgatttctgttggtcactctggtttaggctcccacaagtttctcctggactgcaggagcgctgcactctcctgactctgcgtcctgcagcttcgtttacactcagcagccacagggatcttggtaagatgcaagggtggtcccttccctcctcgattaacactttgcttcccatcacccagagaacacagtcaaacacctgttttggcttgcctggcttactgtgatgtgacgtctacccacctgttaacctcatctcatccttccctccctgagctcactttcctcctgtgtccatttgggcatcctcctggcaggtccttgctcacccttacccttcagggctcagatcaaacgccacctccgccgagaagcccacatggaccaccccatctaaggtggcataaaaagtgagtaaggtggccattcattttcttaccacccttccctattgccttcagaatgctcaggacgatctgaaattattttctacatttacttgattcctcttttctccatacccgtcgcctacacgacagaacataaaccccaggagggccgggatgatccccacagggagttccaacgcctggctcagaataagccttcagtacgggaacacaatgcagtgtgcaggagacagtctgaaggcacccccacccccaattctctgatgagcgggtcctattctgggggtctggtatagggtccaaggcagcatctaagaggcggggcctctgctcagacacgcctctaatgaggcagtttggtttccaaggggtgtgtcctataagattggtgacttctaaagggcgtgtctagtttctagggggcgtgtccgtctgttggaggtggatcatgtatttaagggacggaactcattttgattgatactgactctaattgtatttatttatgaaacagagtctcgctctgttgctcaggctggagtgcagtggtgcaatatcggctcactgcaacctccacctcccaggttcaagagatcctcctgcctcagcctcccgagtagctgggattacaggcatgtgccatcacacccggctaatttttgtatttttagtagaaacagggtttccccatgttggccaggcacggtcttgaactcctgacctcaggttatctgcctcggcctccccaagtgctgggattacaagcgtgagccaccaagcccagcctaaaccgactctaatttaaaagggcatgtactattcaaagctttgaaacttctcaggagaaaacgaggacccgtctctatttagggagtctgtcctaagagattccccatcccccccgcctggagccaaggatcagaaaatgaggcatcagcgactgacaggacaaggtttattgggggtcctggaaacactggggagagggacgagggggcaaggtcgaggctcacaggggcaccccctagccaaatgcccccttcccctagggattgggaggaagacagagacagacaaaccaacagagatggagagaaagaccaacggatgctacggagagagggaaggaaaccccagtgtccaccacctcccactcagatgagttcacaggataaagaattgcgtggaccggtccacacgctacaggaaaagagaggagtgtccgccctattcactctaaggaaggtggcaggccacagcctagaccagcccattccatgtgatgggggtgtgtgcacatagatcagtccattctactgggcaaggggatttcaggccagtctattctagtgtttggggcggggaagatcgttagggtcgatccattccacagtcggggaggggggattcgagggcagggggcatctaccctggtccctctttcagcacagggaatgaaaaaggggaaaggcagatttcggctatatccattttctggggtcaccagtgactctggtgggtggcatttggagggatctaggaaaattcagggacatgctccctccacattctccagatcaaggtcgttaggaatgatggctctcagggaatggggcagtcttcccttggtgggggtgggtgcccatcttttagtattagggctctcaagatgagaggtacttgtggagacccattgctcactgcaaagtccccatgtcttggggacttacggctacccacactcattccagggacctcaggctcaggagtctctccctagatttgggctcccctgccccagctaaggaccctgtttgtttgtggtcccccagctccggggcctttgtgggtttttggtggcccccacctctccagtcagggtcccctcatttcagggcctgcgtctggatttggatttggagggccggggcctcacgcgcagtcccgaggtcccctggtccaggccgagtccaggaggctgggtggagggcagggcgcacgcagcctggcagtcagtccatgccccggtgcagcttcaggtgcctggagaggttgctgagcgtgatgaagcccttgccgcagatgtggcaagggaagggccgctcggtgccgtgcagcagccggtggcgcttgaggtagcactcgtggcggaagaacttgccgcactccaggcacgggaacggcttctcgccagtgtgcaccagcacgtgccgctccaggtctcgcggtgagcggaacagcttctcgcactcggagcagccgaagatcttcttgccgcggccggagccagacgggggttccccggacgccggttccctttcccgggcggcggtcgccgcctcctccccgccgccctcaccgtggctgacccgccggtgctcctccaaggcggccagcgccgcgtacagagccccgcagtggccgcagccgtaggtggccgggcccgagtgggcctccaggtgactggccagggccgcggccgacgcaaagaaggtcccgcagtcgcactggtacagggtgtcttccgagggctcggcggccgccgcaggtgcaggcgcctccccaccgccctcggggagcagccccccgagcttgggcacgccgccccccgcggggcccaggagcagcctgcggtccgaagccagaggagcgtcgcccgcctccgcagcggtgccttcgcccgccgtctcgggccctgcgcctggccccgcggcccaggcctgcgctgggggcgcgcccgggccctgcaggtcgtgcgtcagcttgtgccgctccagcagcgcgggcgcgttgaagtcgcgctcgcagcgcgggcacttgaagggcttcacgtcggtgtgcgccgcccagtgggccgccagctcgcggccgtggtcgaagcgccgcgcgcaggcgccgcacgcaaatgggggcaaggaggccgcggccgcagctgccgcctctgccagcccccagctgcccagacccgcgcctgccccctcggggccctctccgccgccggcccctgagcccccgcacaccgagcagggccccacattgcagcagacggagcagggcgcactcaaggcgggcaggccagggccgggctgcaggggagaggggagaaccccacggtgctggcgcttgaggtggcggcccaggctggagcgtgaggagaagcggagctcgcagaccaggcagcagtagggtttctcaccagtgtggacgacctaggggtgcgggaggaagggcacaacgtcagggctgagaacctagcccggacaacggattcctggactcccagagggttgtggcacaagctctctgtcacacctacagggccatgatctagggaaacgctcgtcctatcactctctgtttggggtcacggtagattctttcggtccttaaaaaggccatgtcctggctggccatggtggctcacgcctgtaatcccagcactctgggattgcataagcctaggtgtttgagaccagcccaggcaacacagggaaaccttgtctctacaaataattttaaaaactagctggacacggcacactcctgtggtcccagctacctgggaggctgagccaagaagtttgaggctgcagtaagccgtgaccatgccaccacattacagcctgcatgacagggtgagactgtgtctcaaaaaaaacaaaaaaacacgactgggtgcggtggctcacgtgtgtaatcccagcactttgggaggctgaagtgggtggatcatttgaggtcaagagttcgagaccaacctgatcaacatggtgaaaccctgcctttactaaaaatacaaaaattacccgggcctggtggcgggtagtcccagggacctgtagtcccagccactcaggaggctgaggtagaagaatcacttgaacccggga[233 bp omitted]gtggcgggcgcctgtagtcccagctactcaggaggctgaggcgggagaatggcatgaac[149 bp omitted]tgacacagcagccagccctagcagggtgtgtcttctcccttgtcaagccctgctatcccgagccagttatcatgagctgaatacaggccttaggtgtgttagggcagagaagtgattttgaaccgaatccggctactgctcagagtttctcccactgaacgcttttcacacatacagatccagggaatcacttccaagtctagggaatcgaatctcccaggagggagtccaggaatctgtatttttttctgaggcattgccaggcttgtagactgtgtaaaaccgtgccttagagaggttttttgtattgatatttgtccttgttgatttaagattttggaataacagagagagatttgtgagtatggtaatgtcttcctggaggcctgtgaggagaagggtgaggctggatgagaaagagtgcagtgcttgattagtaatgtctgccaggggcacagatctgaagaaggaacagggagtgatgttcatttgcctttctggctccagactcgatgcacctgctgtacagtgtgggtgtagggatctctatcctctttgtcactaaatttattctctctctactcttttaacacaacaagattatgctggtcccagggcccttgtacatgctgttctcactgcctggaatgcccgtaggtctatttatctgtcagctccttggaaacccttcccggaatctggccccctggctcatcagtgatcctcttccaccctccttctttaaagcctatggctcatagcacacttagtgtctacatataacttgagtgttgtctgtctccccaccagctaaggacgataaaaatagtgaccacattggttttgctcacagctgtatttccagggtccggcactctccagacttctcctgagccacactttctgcttctccatgctccagtcacattggccttcctccagttcctccaaagcctgctttgcttccttgaaagtacacattttgttccctggatccggaaagcctcggaccccagaggcagatcattcctcacctttttctcgggaaaaccatccctgaccccatccccgatccagactgcttcagctctctcttgcattagcctcagaatatggttatcctccatcctcagatgtctcggctgcagcctaacattgattaacctagttgttcagttcacatctcccacatttgactcgaggccatacaaagggtggactgtatctgttttgttcccttagctattttttttcccccagagagcctagcactgtatctaaatacagtaggtgctcctgaaatggttcagttgaatcacaacctactggtgggtgggggtgaggcccctcaggggactgtcaattgttgcatcaagctaaggagctcccctttcatcctaaggatcaagggatttaagcaggggtcacctggtcactctgtgatagatgcagagactggatgtgagggagagagacaggaaggagggagaccactgagaaagccggggccaacattcaggatgtgaagtcctgaaccaaggcagatgcatggggacagagaggacagccaagtgtgaaagaccatcggtagatgcctggttttcttcaccctggttgtgcaagtgtctggcacatagacagagtgtgacctagcccgtcccatctttcaccttacctccttccaccccaaccccacagtctcccatcgcttcctggaacacagcacactccttccttcctcagggcctttgcacttgctgttcctgctgcctggaatgctcttcccagggaggattcctcacactgcaggttggctcaggtatcacctgccctaaccttccccacctgtctgaagtagcccatagctctcctctctttactctcacacattgatttgtattttttgtttgtttgtttgtttggagactgagtctcgctctgtcgcccaggttagagtgcaatggtgcaatctcacctcactgcaacctctgcctcccgggtccaggcgattctcctgcctcagcctcccaagtagctgggattacaggtgcatgccaacacgcctggctaatttttgtatttttagtagagacagagttt[131 bp omitted]cctatctttttccagaacattcttgccagcatacttgctttcttgcttcttgtctacttggctactgaccacctccaaaagaaagtaagttttctgaaggcatggaatttgcttttgccttggcaacacagccgtttggtgcagggaaagctgatagtcaatgaataaaggaattaagtatataactgataatcaatgaataaaggaattaagtatacacctgataaacctaagtcttaaaacggtaaggaaggaaaggataaacactagattgcagatgctggtgcgtgcacgcggggtattggcagggagatggggcgggcaggagcctatagatggggaaatttactatgaatgttccagttcgtgggttgctggtgactgaatgagaaatagcgcatgctttcaagggtcagggtgctttggtagggagggagggacattttctaatgggaggaggcgggcgcctaggccttgggccagcttccttttgcccagagtacagtggggcgcgggatcccaccgtagtcctgaccagggaggccagcctagggccggcctgtgggactcacctggtggtgcagcaggccggtggagtcgcggaaccccttggggcaggcagagcagcggtagggccgctccccggtgtgcgagcgcaggtggttggctaggttgaagctgtgcttgaaacccttgccgcagcgcggacatgcgtggggcttgagcgctgtgtgccgggcaaagtggcgccgcaggtctgagcggtagcggaagctcttgccacattcactgcagtgaaacgggaccctgggggcggcagcggcgggcggtgctggtgcaggggttggggcggggacgtcatccatggtggcggggaatacagtggtatgtgggggctctctctggagtagtggggagacagaggagcaggtgagggggtcggctccccatcagctctctcctcccaggttcccagacccaccacctgtcccctgggagaccctcccactgcccacctctctaagccactctcattgttctttaaaatcctcctactctcttagaaacccttctctcgcggctccacgcctgtggcaaaatcttcctaatcacttcatagtctcctcactccacggagtgtttttaagcctctcctcgctcttcgccaatgcgcggccactgctctctgtgcccctcccactgtaatttaagcctctcccactcttccttaagtcccacctactcccttcaaagtcccccacaatgttccctaaggatcttgtattctttgccaagcccttttccttccaaaaggccctcccactcccctctaagctcctcccactcctcttccaggatgaccacttagcgaatgggagggcaaagatttggggctaagcacactggagtcatccttgcagggagaccagaattactcctgtaacatcagataataaaaattcttcatctgtaaaatgggaatagtagtacctacctcatggagtggtggcgagaattaagtaaaattgtggcaataaatgctacgtgcccacttaagctggtgcacagcaaagacgcaacaagtaagctgtttggatgactattatcccgtaagttcctcctggattcctccttaagtcctaccatgattgctaagttatttgacttatctaagcccctctcgggtccactaagacccacttccaaaactccacccaatttttcctttaaagaagccacatcctttctaagactctccactggactcccgtcaccttctcaggccttctctacgaagtctattcccatcccctgcaagtcctttccacattcattataaagacctgatagttgcattaaacccctccaaattacacccttaaactccacccccctcactaggcctacctacttctctaagccacaccccagacaaactccatcccttctactctaaactcctccctcctgcttcctgggctccctttacccaaccagcctcaatgagtttccttccacccctcaatccagggcctacccaccattccttctgagccacgcccctttatcaaaccccacctctttgcctaagaccctcccattttctatccagactctccctcctccacgcccctcccacttccactctaagctccgcccaactcaggctcctcccagcccttgctccgccccagcagccactaggccccgcctcctcctccaccccgcagcctgaggagcgggcccccccacttgcccagtctgctccaggccccaggccccgagagccggccttttgtgcccctccccctgcccctaaaaggtgcagccctgggcgcccggttggggggcaggtcgggcaggccccggggccaggcgagtccacctcgctcgtacggagcgttggtcctggagacccggggcggccccgggaggccggggaagtccgtcggctttcctctttaattacttacacctccctctgggcgccgacattttgggcagcgggggcagcgtcacttccacccggggggcccctcgacttccgcctcagctcccttcccccgccgtactccccctttctcccgccctcttggctccccttcctcatccccgcccttctccctctttccctttcctttcccagccctggaggttgaagaagccaggcccgcgccatcttgggtgagggcagcgggaaggggcggggcttagggacacccacggcgccatacagactaagggcaaggagctgagagcgagggggcttctccgtggcgacactaggcgatgctaacgtaaatgagagcagatactatttctttttcacagcctcggactcctccgattaggatgtacagttggactagggaaaaaaaaagaaagcgaagtgcgccaactgcaatacagagctggaaaagaccggcaccatcttatccacttagcactccatgggcttcgaagcctgtccggtgccatgttaattacgggcactgggcagccattttcccgctcctcatcattcggtatctgtctttgggtcacccgactgtgggctttgtgagaggaaaggcgtttcgaggtggttggggatgtggtgctgggttatttcccactggggacacaccagggccgccggtgcgcaggcgcggcttccgggcgtggccgcgaccggtcgttaggacccagcgagtcccctttgtttcccgcgggcgcgcaggcgggcgggaagggcaggaagggaggggcccggcgcttctccgaggggcggggccggcaccgcgcgccgccgcccccgcctcgccgccgccgaggggcagggccccctcaccccctccccttcccacgcgccggccccgttgcccccgcgcgcgcgcacactcgcgagccccggcgacatgcaaatgaggtacccgagaggcggggggcgcaggcgggagggggggtgtgggggtaggggaggccgggccgcgcgctcccggagcgcgcctccaacacctgttcctgctcccgcgctcgcgccccgcgaagccgtccgggcgcgcgcgcgcagacccccttcctggcagcccccgccgcccgcttacccggcgccgctcattggccgtcgcccccgcagggcccgccccgcgcttgggcttcgcagctcgggggccgatgggcgcgtcagtaccggggcgaggggacggggagggtcgggggaccagtctccccctttccaccgttccaaagaccagactcctagactaggctaccccgtgggagcgaaccgtatggaaaggtggttgctcctctctggacagcagtctatgtggctgttaaaggggaggggggggtgcaggggggcacctgcagcacctgcttccagctgcacctgtgcctccccttcccctccgttacaccccaatcccatgctcccagtatctgagtgggcgccgggaagatggtggtggcgttggtgaagtttattgagtgcttactgtgcaccaggcagtgttcgaggggcattttaaagcccactgtcttattcgattctcctgacaaccctggtttattcacttttcagaggaggaaactggcaaagtcaattgctagttataggcagagctgaattcaaacccaggactgagccctcgtaatgtcccctttcctccttgggtttatttgttctccattctctgggacattcgggtcacaagacctgtttccagttttggccctgccatttactggcagaggaacttaggcaactgacttggctttcctgtgcctcagtttccccatctgcaaaatgggacagatatgccctattcagagggttgatgtgaggcttagctgctcctgataacaatggctaatgtgtcctgaaagcttctgtgtatgaacactttgtgggtattatgctcatggcatgtctgggcaagtacgtagaactatgtgtcccattttgcaaaagtcttgattaaggcttagagaagcgaacaccttgcccaaggccacgcagagagtaaagatttgaacgaatgatgtcttgactccagggcccaggctcttaacatcgcagatatgtttcctcatccaggaatcagggtcaaatatcacctgggaccagtcccttttttccactctggaaccccttccccacttctgccagtcagcagggagggatgagagcattcgtgaggcctctatggctctggagtttgatgggctctccgtttcaaggatcacaatactggtctgcactctcagttggactctatcctctctggaaggtttttttttgtggggaggtggggaggggtgttgctcatgttgatcttgaacttctagatccagaaggagagttagggaggcatagggatgtctggtggagctcagggaagtgcctgtttatcagctgatacaagatcatctcactgttttacccaccagcatagctaaaattgtgtatctggatgaatgtcaaacacacctttgtcaagagacttggagagagggatgggcgaggtgttgggggacacaggggtgctctagaccctgtgagcactgactctgcccctctctcctcttagctggctccagtgcccagacccaagccccccactgctcaatggacacccccagcccagacccgttgccttcgcctttgcccggggaggaagagaaacctctggccttatctcctcctgttccccggggccgccgaggccgtcgtcctgggggagccacctcctcaaatcggacactcaaggcctccctccctcgcaagcggggccgcccccccaagtcagggcaggagcccccactggtgcaggtgcagggggtgacagccccagtaggcagcagtggcgggagcgacctcctcctgatcgatgatcagggtgtgccctatacggtctctgaaggttcagcggctgggcctgagggctctggccccaggaaggccccacacttctgcccggtgtgcctgcgggccttcccctacctctccgacctggagcgccacagcatctcgcactcagagctgaagccgcaccagtgcaaggtttgcggcaagaccttcaagcgctccagccacctgcggcggcactgcaacatccatgccggcctgcggcccttccgctgcccgctgtgcccccgccgcttccgcgaggcgggcgagctggcgcaccaccaccgcgtgcactcgggggagcgcccgtaccagtgccccatctgccggctgcgctttacagaggccaacacgctccggcgccatgcgaagcgcaagcacccggaggccatgggggtacccctgtgtgcaccagatccagggtctgaaccgccgtgggacgaggagggcatcccggccacagcaggggccgaggaggaggaggagacagaggggaaaggggagccggcctgacccacacccccggccatcgctccctgggccaggtttagagcagggagtttggctggtgctgggcctgagccagggggccgggacacccttgtttccggtggtcttcccgttgtgggagcaggtggagggtggagacctaaactttggggtccagctgccttcagcccccctcccccagactaacagacccttggaggcaggggctgtggaaataaatctctgcctgctggctgcctgtgtgtgttccgtgccgggatgccatcctctcctgccttcaaatgttcttcctcggctacaccgtcctgtcgggagtgcggggaattggagaggaccccacttcctgtgcctcatgagcgtggtgctcgccaaagaatggttttggggggaaccttggccccttccccatctccatcagaccccaaagtccatgggtccctcggagtccgcggggaattggttccacgaacctcgcagataccaagatctgggcatacacaagtccagcagtgggccctgcggaacccgcggatgtaggaaaatccgcccttcgtatactgtatgttccaccggtgtttgggtgaaaaaacgtccgcctctcaatggacctgcagttcaaacccctgttgttcaagggtcagctgtattcccagtacacatccaatctaactaaaaacattgaaccttccatgcagacctgactgtaggtccgaccgcctctctcctagccaattcccagaaattctgcagccactttgccccacctccttgtcctgaggacctactgtttggaaggaaaaattaagacaaaggtatgagcaggacggtctgggtaaggtttagagataaggggtgtggattggggcggggctaaggagcgaggggtggggctgagattgcggggcagttaggctgggacctggggcgggggcttagaagagggttagagttgggtggggcttaaagaggtttaggggttggtccgcagaaagtgagagcggtttaaagaggatggatagagttgatctaatagagagtaggggcttggagctggggaagaacaggaggaactgcgtgagagtggggcaaggaggacggataattttttttttgagacagggtctcgctctgtcatccaggctggagtgcagtggccctatcaccgctcactgcagcctcgacctgccaggctcaagcgaccctcctgcttcagcctccggagtagctgagactacagacgggcgccagcatatttagctaattttttttttttgagacggagtcttgctgtcgtccaggctggagtgcagtggggcaatctggctcactgcaacctctgcctcccgggttcaagcagttctctccctcagcctcccgagtagctggaattacaggcgcccgccaccacgcctggctaatttttg[167 bp omitted]at[138 bp omitted]attcagctctgaggtgggcgtggttcagggccgagggccgggggccggggcttaaaggagaaactctgagggaacagggtattggaggtgggacttagaaggtgctgatgggggcgcacgactgctatggaggcgatggggagagaaggaagtacttaatctaagggaagttcctgggagagtggaagcttagcaggaggggctgaatgggtctgggtttggctgtttgggatggggctgagttgggagccgggattatagcgattatatgagcgggcagtgtcaagtgtggtaaatccatggctcttgaccagcatgcagcagaatcagagtatttcaaaacacggatccctagacccccaaccccagggcttctattccgcatggtctgagcaggcagccggatgctgctggcctcccaactatccttgacaaccaccgatttaaaagaatgctttagaggtgggaggcactcaaaagtcacgaggtgcaacttaaatgctatggggtgaaggggcggggcttggatggagggggcggggcctagggaggggtgaagttccagagagtgggagcttggagagggggaagaacaggagaaactgcatgagggcgaggggacgaagacagactttgaggcagtagggggcttataatcacgctgtgagatgggcgtggttcagggccagggggcggggcttcagtgtgagacccgagccggaggtgtggcttaaccggacgcccagagcgtgtcgcggggttcccgtagaagaggcgggcattcaaagcgcaggcgcacctggctcagttcgcccaccggaatcggcccgggctttcactgctcgcgtccccgagtcagtgcgcaagcgcatttcccccctcctggtccccgccaccgcctcctctttccgatcctccacgccggcgcctcgggaacgggcgcgacttccgcttccgggcgggcgggcaggcgggcggtgcggggctgccggggaggggggagggggcggcacttccggtcgggccctcgggtctccccggagcggcggcgcctcctccgcctcctcggcctcctcccggcggagaccccggcgccggtgagtgacggggtgcgtggcccgggggcccgggtgcagcgggggcggggggccccgccctggcccgctgtggtccccagaacgtcccccaacccctagcaagtcagtgcagctcccgccgggcccttgccaagggacccccaatcactgctccccggtaggatcactgcagatagctcccccatgaacgcccccagctaggatggctgccaaagcgctttcattcgtggcgatcccctaaacggctgccagggcccccaaatgatacctcctcgtaggatcccctccacatagcgctccccgtcattgcttcctccaggtcagcctccagatgccatcagcattgcccctccccatgtagggcagctgctcgtgaaccctcttattagtatcctctatataattctccccagagtgtttccttagtgccttgcagcagaactgtcccccgttatctctgtccatacagcaacagcccccaatggccctgaccacctccctccccagcagaacgccccttcgtgggtgtgaaaatactttctattctggtcagcaccaagaatgcctttttcccttctgcaggtcctccagtgattccccttaagaatgcccctttcaaagccacccccccatcgcagcggcacagctccctctagagttccttcacactcacatcctctcccgcctcaggtagaaatatccgcctgcttagctccaggctcccatgacatactcccgtacctcctctcaccccaccctcatcgcggtcagcccgtcttcattacttctgccacagaacagtgtcccgcagtgaggcggtgaagccttccttcccagaatgtgcctcatcctcttcctatggcgtgaacaactgttgccctgacctgcagcttctcacccagctctcaggctatcgtcctggactccctagggaagaccctggacttcactagggtgtgacttcttttctcgtaggcattccttctgcgttgaacgcatattcactattctagctgaagggtataatatacagccacgaagggggtcgatacacacagtgttctcactgtgcggggtctcacagtctagttgatcagacacgagtcgacaaagatacacggggttttgtgggttctctgagagcctgatgaactactttagaggtgaaagctgaattacaagtggcagcttagccatgcaaagatctgggtgagcaggcagcaagaacaacaagtgcaaaggccctgaagtggcggtgagcacggtgagtggaggagcagcaggggaggccggtgagggtggagtggaagatttgaaggcaagaacaagaggaaggaagctttggtctcaaaaggctttggaggtgagggcactgggataaattatctagcctttgtcagctctaccgagcccagaatgttcttcattcattcatacgttcattcgtaaacactggttgaacaactgtttaatgagcacctactttacattgggggtacaacagagaacaaaatagacaagaatccctgtcctcatggagtggatatgctagttgagggggcagatgattaaaagacaaaatacaggccaggcgaggtggctcatgcctgtaatcccagcagttgggaaggccaaagtgggaggatcgctggaggccaggagttcaagaccaacctcggcaacatagtgagaccctgtctttacaggaaaaaaaaaaaaaaaaaaaaaaagctgggtgtggttggtgggcacctgtagtccccagctattcaggaggctgaggtgggagggctgcttgagcccaggagttcgaggctgcagtgaaaaaaaataaaaacaaaaaccaagagtatatgtgcgtgttcagaatatcacgggataaagagatagacctggggggctgtggttcaggatggcctcccccaggattttcctatgtcttgtcatcttgtccctcccaaaagccacacaccaaaaagttatacaagagtaaaaattccccttctcctggacaactgtggcccacttgggggctgctcttaacagcgccctaaccccaggagcgaagtgattgggaggatgagccctggattccactagggttcacagctttgagcaaatcactccctcctttcctagcctcattcattcacttcttcaaacaaaaatgtatcaagccaggaactgttgtaggtcctggggatggaacagtgagcaagagataaaaatccttgccttcaggaagccgatcatctggatggggagaccaacaaaatcaaggcaaagaagtagattatgtgaggttataaatgatgctgagcagtaaggagagaaatgaagcagggttagggagatgaggatgtgggcctgggtgacaggtcattggttactgagaggctcattgagaagacagttgaccaaagatggggaggaggtgaaggggtgagcgagatggttgcctgagagtcagaatattacaggcaacagcaacagccagcgcaaaggccctgcagcaggaatagagtgggcacatgggaagagcagccaggagactgtggaggtcattgtaaggactgtggctttttttttttttttttttgaaaaggagtttcgctcttgttgcccaggctggagtgcagtggtgtgatcttagctcgctgcaacctccgcctcccgggttcaagtgattctcctgcctcagcctcccgagtagctgggattacaggcatgtgccaccacgcccagctaattttgtatttttagtagagatggggtttctccatgttggtcaggctggtctcaaactcccgacctcaggtgatccgcctgccttggcctccaaaaatgctgggattacaggcgtgagccaccgtgcccagtcaggactgtggcttttgaatgagatggggttactgtttggtttgggaccgaggatagacatgctttggttatagtcctcctgtcagtaaaatgggaataataataacacatttgttgtgaagtttgaatgaaacaagccacataaggcacctaagtacaatgcttgttagaggtcaacaaatgttggtgacttgttctggtcttgggtcaagccaagagacttgggatttgttggcagggagatgggtggagcaatgcatgtttccagtatgaagtgggattgggggcgggggtcctccttcattttggagggagaaataccgaaagacagcatgtgatgggactctggagccttgctgcctttcttcaaccactggccctgccactagttaacaatgtgactttagaagtttgtttgtttgtttttgagaaacagagtctcactctgtcacccaggctggagtgcagtggcgtgagctcactgcaacctctgtgtcctgggttcaagcaattatcctgcctcagcttccccactagctggaactacaggtgtgcaccaccacacccggctaatttttttatttttagtagagacggggtttcactatatattggccaggctagtctcgaactcctgactatagttgatccacccacctcggcctcccaaagtgctggcattacaggcatgagccaccatgcctggcctgactttggaagtttaatttatctctctggccctcagtctcttcctttgtatttcagagtcaatgcttgtaaccatcttctagggttactgggaggattcgttgagctcacacacatcagagttacaagagtgctgggctggtagaaagcacacatccagtgttatatgcgcacgttactctttattaacaaaccagaatttcatcacaaggcagcgttgttgcagcagaacggcccacagtctggcatcagaaagacctggaatcagttacctgctttcctctttattggccacatgaccttggaggaatgccttccccatgctgctcctcagtttccccacttataagatgggcccagtcatggtacaggactgtgctgcctccaggcaataacaaatatcaaactggtcaaacaataaatgtgaaccgttaatacacttgctgtgggactcctgtcccttggtggtggtggtggaggggtgggtccctccccatcatgcttctctctgcataaaaccctcctatgacatcccctcttaaaaagataccagtttaggcttgagttgtatgaaagagggaatgtttctggtttcctagtggagattatcataagcctgatcaattctgtccaccactgatgtatccccttcagcatctccacaccctgccctcagtgccctcctcataacatcactgtccccagaattgcttctcccaggaattcctgggatcatttagctccatttctgctacatgtccccctccgttcctctgggagtttgatcagcttagtctcatcgctttgttcattccacaaataccaagatagacattcacagctgtgcatttccctctgagcattgctttggctgcacctcctcagctttggtatgttgtgttttcattttcattaattgctaagcagtttttttgctttttgtttgtttgtgtttttgagatggagtcgcgctcttgttgcccaggctggagtgcagtggcacgatctcagctcactgcaacctccacctcccgagttcaagcgattctcctgcctcagcctcccaagtagctgggattacaggcgcccaccaccaagcctggctaatttttgtatttttagtagagacggggtttcgccatgtaggccagactggtgtcgaactcctaacctcaggtgatcctcctgccttggcctcccaaagtgccgggattacaggtgtgggccaccgcacctggccagcattttctaatgtatgatttctttgtggacccattggtaatttaggaaggtggtgtttccttttcacataccagcagatatttgtcaagcacccacactgggccagtgctacgctaagtgctggggtcacaggggcgagcaagacaggccaagtccttgctttcctagagaggggccaaacagtaaacacacagaaaaggaatgacatgagttggtggcaataactataatgaaacacctgcggctggatgagggactggagagtgatggggtggggagtgctgagtagagacccaaggaggctccagagggagtcttgttgaaatctggcgaagaacactgtaggcagaagagaaagtaaccaccaccctctcccaccaggccccttgtatagacacccctcataacccagaagacatccctaaataaagctcttatcctgatagttctcccctcacctttgttcactcggggaacagcccagtgaaacactgctgtgggggcaagggtgggaatggggttcaagcccattgatccagactcctactccgtgaccatggcaactcactttgcctctccatgccttagttttctaatttatccaacggcgggaacagctgcccctatttagagttgtggggagtcagtgaattaatatgtgtaacgtgcttagaaccgtggcgggcctctaggagatgtccagtcagtgacagctacgattaacctgtgctctagtggagacaagctagtcaggggcttctttccccaaacactcttgccctccctccccatagcgccctaaatcaccccctattccctgcatccttatggcctgtgtttgcctccctggccagtcagccccctccagagctgtctccccaacttaggttccacctacagccttccaattaccaccccagccaagcctgtcctctttccggagatcagattaaacggagggggtgtgaagggcatgggatgttgagtcttgtccaaggacaaggacacccggagctggagactaaaaatatctcactccaggatggcgtttggggtgggggtggaagagacactcacccctcacctgtgggaggagagagcagcccgatggatagaggataaagggtccaggccttggtaggaacccccttgacccccatagcgggctgggcttagagcctggcccccatcgggtagggatgatggacaggaagcgggtcagacctcatgggcccttcaccgactcaccctccgcccacttggtggaggtgcttccccaggccagcaagtagaccaagaactcggagatcagttacgggtgctgagggtctggtgtggtgtggggtacacacatggatacctgccatctggaatgaaaagtcgtgtaaaggaggtgccagagaatgatgccgggggtggagggtcaggagaagccccactaagggcaaggacatgggggggtcaggagaagccccactaagggcaaggatggaactcaagctccctgcttctgttgctaggcttagcccaggtgtgtgatgtcatggatggtacaaatagctcagggggttgaatgcattctgctgatgcatgtgtttcattatgttctgttccaaccctgttgaatctccctgcggtataggggttcccccattttaaacatggagaaagtgtggatcccagtggagatgggatttgaacccaggtctgtccaagcccagggtctgtgttttgattgtatcagaccaccttctgactatatgccagcccccttgctggaatttgtttctcccaggcaagcaaattctcctttctactgtctattaatattaaaagagtgcactccccatactgacttttttcagttctctaggcttgtcctgacttccccatttctactactagtagtaacagtgataacagtatcgtatcttcaattttttaattttagtttttagagccaaggtcttgctctgtcacccaggctggagtacagtgatgtgatcacagctcattgtagccttcacctcccgggctcaagcagctctcctgcctcagcctcccaaagtgctgggatgacagctgtcagccactgtgcccagtccataccttctatgtacggagtgcttacagagtgccaggaaccgccccctaagagccttgcacatatgtgtgtgttgaatcctcacagtcctgtgaggtaggcatgtgctttgtggtccccaggtgtagatgaggaaatggaggcacagagaggttcagtcacttgcccgtggccacacagctagaagtggcagggcttacatttgattctggccccagagtcctccctcctaattacgctgatagaaactgtgattccccttatcattatgctcattttaggataaaacctgaagggatgaggacggagggctgtgggtggggtagggtgcaggagtatggagagacagcagagggtctgagagggtttggaaagaaaactgagtccagaggcccccaggatgcttggacaattggagtctgaaaaggagagaaagtagagacggcccaggccagcgcgctggctcacatctgtaatcacccagcactttgggaggtggaggctggaggatggcgtgagtccaggagtttcagaccagcctgggcaacaaagcaaaaccccgtttctacaaataatagagggcctgcaggtggtgtggaggagagggtcccctctacaaagctgtgtcaggaccccagaaaagatggggagagatggaaggaattagagaaggaaaagaggtggggagtgggtgggagttgagaacacagagagggaaggtgaaggtgagtaggagagtcctggggccagggagccaagaggaagggctgccctttggggtggacaggcagagggactggaagcctaaatctggaaggctagggggtgatccgcacaaggatggatgagtgggcgcacagctccattcacctgcggggagacccagcgccgcggccgtgtcctcagccccgtcctcctcttcacagggtctcccgtctcccacccgccggagatggaggcgaacccagcgggcagcggcgccgggggtggcgggagcagcggcatcgggggcgaggacggggtgcacttccagagctaccccttcgacttcctggaattcctcaaccaccagcgcttcgagcccatggaactgtatggggaacacgccaaggcggtggcggccctgccctgcgcccccggccccccgccgcagcccccgccgcagccccctcccccgcagtatgactacccgccccagtccaccttcaagcccaaggcggaggtgccctcctcgtcctcgtcctcgtcctcctcctcctcctcttcgtcctcctcgtcgtcatcttcgtcctcttcctcttcccaagccaagaagcccgatccgcccctgccgcccgccttcggggcgccccctcctcccctctttgacgctgctttccccactccgcagtggggcatcgtggacctctcggggcaccagcacttgtttgggaacctgaagcgaggagggcccgcgtccgggccgggggtgacgcctgggctgggcgctcccgcgggggccccagggccgcttcctgccccctcgcagaccccgccaggaccccccgcggcggcggcctgcgaccccaccaaggacgacaagggctacttccggagactgaagtacctgatggagcggcgcttcccctgcggcgtgtgccagaagtccttcaagcagtcctcgcacctggtccagcacatgctggtgcactcgggggagaggccctacgaatgcggcgtctgcggccgcacctacaaccacgtgtccagcctcatccgccaccgccgctgccacaaggacgtgccaccggccgcggggggcccgccccagcccggcccccacctcccgccgctgggcctcccagcacccgctgccagcgccgccaccgccgccgccccctccacggtgtcctcgggccctccagccacgcccgtggcgcctgccccctccgcagacgggagcgccgcccctgctggtgttggggtgccccctcctgccaccgggggtggcgatggcccgttcgcctgcccactctgctggaaggttttcaagaagcccagtcacctccaccagcaccagatcatccacacgggcgagaagcccttctcctgctccgtgtgcagcaaaagcttcaaccgcagggagagtctgaagcgccacgtgaagacgcactcggccgacctcctgcgcctgccctgcggcatctgcgggaaggccttccgcgacgcctcctacctcctcaagcaccaggcggcccacgcgggggcgggcgccggggggcctcggcccgtgtacccctgcgacctgtgcggcaagtcctactcggctccgcagagcctgctccgccacaaggccgcccacgccccgcccgctgccgctgcggaggcgcccaaggacggggcggcctcggccccgcagcccccgcccaccttccccccgggcccgtacctcctgccccccgaccctcccaccacagacagcgagaaggcggcggcggccgcggcggcggtggtgtacggcgctgtgcccgtcccgctcctgggcgcccacccgctgctgctcggcggcgcggggaccagcggggcgggaggctcgggcgccagcgtcccaggaaagacgttctgctgcggcatctgcgggcgcggcttcgggcgccgcgagaccctgaagcgccatgagcgcatccacacgggcgagaagccccaccagtgccccgtgtgtgggaagcgcttccgcgaatccttccacttgagcaagcatcacgtggtgcacacgcgcgagcggccctacaagtgcgagctctgcggcaaggtcttcggctacccgcagagcctcacccgccaccgccaggtgcaccggctccagctgccctgcgccctggccggggcagccggcctcccctccacccaaggcacaccgggggcctgtgggcccggggcctcgggcacgtctgcagggcccaccgatgggctgagctacgcctgctcggactgcggcgagcacttcccggatctctttcacgtcatgagtcacaaggaggtccacatggcagagaagccatacggctgcgacgcctgcggcaagaccttcggcttcatcgagaacctcatgtggcacaagctggtccaccaggccgcccccgagcgcctgctcccgcccgcacccggcggcctgcagcccccggacggctccagcggcacggatgcggccagcgtgctggacaacgggctggcgggggaggtgggggcggccgtggcggcactggcaggggtgtctgggggtgaggacgcaggcggggcggcggtggcaggtgctggcgggggtgccagttccggccccgagcgcttcagctgtgccacgtgcggccagagtttcaagcacttcctgggcctcgtgactcacaagtacgtgcacctggtgcgacggaccctgggctgcggcctctgcggccagagcttcgcgggcgcctacgacttgctcctacaccgccgcagccatcggcagaagcggggtttccgctgcccggtgtgcgggaagcgcttctgggaggcggccctgctgatgcgccaccagcgctgccacacggaacagcggccgtaccgatgtggcgtgtgcggccgaggcttcctgcgctcctggtacctgcggcagcaccgcgtggtgcacactggcgagcgggccttcaagtgcggcgtgtgcgccaagcgcttcgcgcagtcgtccagcctggcagagcaccggcggctgcacgctgtggcccggccccagcgctgcagcgcctgtggcaagaccttccgctaccgctccaacctgctggagcaccagcggctgcacctgggcgagcgcgcctaccgctgtgagcactgcggcaagggcttcttctacctgagctccgtgctgcgccaccagcgcgcccatgagccgccgcggcccgagctccgctgccccgcctgcctcaaggccttcaaggatcccggctacttccgtaagcacctggctgcccaccagggcggccggcccttccgctgctcctcctgcggcgagggcttcgccaacacctacggcctcaagaaacaccgcctggcgcacaaggccgagaacctcggggggcctggagcaggggcgggcaccttggccgggaaggatgcctgaccgaggggttcccatcccactcccatcaaaagcccccttctggactcccacctcccaggactgatcagactcttcccccctcctcgctgttgccccatccttcagaacttcacacggactggcgaccttcagggcgcacgcccgacaggctcaagactgaatcactcccatcctcgacctctctgccctcccctcatcccatcagacactgaaccctatcctccgtccaaccctcgtttgtgacccgcatcagcccccgccccagcagcactctgcccccagtaagttttggcggagatgggtctgaaccgcccctccccctcctttggaatctggctggacagtggagtatgagcagagttgggagggcacaagggagtgctgggtgctttttggggtgggggggtggggggcggggtggcagacgcggcttgtacagagcggagaataataaatcttaccatgagggccgctggagtccatccttgcatcccacccagggagagtggggatcacatggtggcaaagcacaaagttaaaacttgtttcctctgcagttttgatgccgggcgcctctgtctctcactcactctcattcaacagggacttactgaggatttgctgtattcccagcgttagtctgagctgggcaaatggagatggacaagacaggtaagtgtctgctctcaggaactgacttaacatgccccgactcttccccttccggatgctttcagcctttgttcactccaccaccacttccggagacctcctgcctgccaggccctgagctgggcactggggaaacagatgaattggacgtgccccttggcctcaagtaacacaaaagagaactcccatccggctgccgtggctgcctcacaaccatgtgcagactgatggtcatgatacagctccctcttagcacttgtcctccagggtaatgattgggagattcaaaagcccgttcacagctctcatgttggctctgggaacagcaagatgtatgcctggcaatgtgtgtttagttatctcatttgttagaagaagggcctggggtcctgaagaacaaaggtgctccag[140 bp omitted]accccatctctactaagaatacaaaacttagctggacatggtggtgggcatctgtaatcccagctactcaggaggctgaggcaggagaatcacttgaactcaggaggcagagattgcagtgagctgagatcgcaccactgcatccagcctgggtgacagagtgagactccatctcaacaaataaataatttggacttcagtcccagagtacttcagtacagaaacttgaagatgaggccaggtgcagtggctcatgcctgtaatcccagtactttgggagcccaaggcgagcagatcacctgaggtcaggagttcgagaccagtctggccaacatggtgaaccatcctttctactaaaagtacaaaaattagctgggcgtgatggcaggtgcctgtaatcccagctactcgggaggctgaggcaggagaatcacttgaacccaggaggtggaggttgcagtgagctgagattgcgccactgcactccggcctaggcgacaagagcgagattccatctcaaaaaaaaaaaaaaaaaaaaaaaaggaaaaaaagaaacttgaagatgaaactaggtaagagcgctgcttgggtgagtcctgtgtgacccatgggagagcagctaccctgtgtggctccatgttctaatgctgaagacccagcatgagacagacgttgtgccagtgcccccagggttcagggttcagcagtaacatggaaatggagcctcacagtgtaagggacttggaagtatcactagggcttgagggagcacagaggagtcacctgtcagagtggaaggggggctagaaaagcttcttggggagaaggtgatccctgaacgatgacataaaccaactggagttttccaggtaaagaagtggcaaagaggccgggcacggtggctcatgcctgtaatcctagcactttgggaggccgaggcaggtggatcacgaggtcaggagctccagaccatcctggctaacacggtgaaaccctgtctctactaaaaatacaaaaaatcagccgggtgtggtggtgggagcaggtggcaggcgcctgtagtcccagctacacgggaggctgaggcaggagaatggcatgaacccagaaggcggagcttgcagtgagccgagatcatgccactgcactccatcctgggcgacagagcaaggctctgtctcaaaaaaataaataaataagaaaaaaaaaaaaaaaaagaagtggcaaagatttccaggcggagagtttagtgtgttgaactaaaccctgctattctggagcatttaagacagattagtatggctggaggttgggttcctgggggctaaaccctgaagggtcttgaattccaaactgtggggcttgggtgattttataggctagaggctggaaactggcagctgcaaggccgaatatgaccactaacacatttttgtttagtctgtgcattttttaaaaagtttgacttgactgccaacattgggaaatcaaaagattttacataatgtgaactaatggaacttctgaaagaaactggaagatgtggcaacccaatctgtgttccggagctgagcagccattaccctcttctgaagaggcactctccaatttgttgaataccaattctgagacctggtggcaatcgccattatttcatgttgctgatattttccccttgaacctggccgtcttgctcgtgtatttacattttcacccagctcctgtaggcattcacatttccaaatcgtctcaaagccacaaggagctgtgtcttggtgacaaggatctgcatggatgccatatggagaatgaagagggcaggtggccgggtgcagtggctcacgcctgtaatcccaacactttgggaggccgaggcgagtagatcacctgaggtaaggaatttgagaccagcctggccaacatgatgaaaccccatctctactaaaaatacaaaaatgaactgagcgtgatggcgcccacctgtaatcctagctactcaggaggctgaggcagaagtgcttgaatccaggaggcagaggttgcagtgagcagagattgtgccattggactccagcctgggcaacaagagcaaaactccatctcaaaaaaaaaaaaaaaaaaaaaaaaaaaaaaaaaaaaaaaaaaaaatgcaggcactggactgctgtgcagttgtctgtgtgtgagaccactgttggtctacaagtgtagtgatgccgaaaacacgttccagttccaaagatattaactggctcaactgagggaaactgataagggactggacataagaatgaggatgaagaaggtttaaacctgcccaggtatccagcttgggtggtggtgccaatgacatcagaagcatggaggtttctttgaggaaaatggaatgagttctgttcacattgtgagttgcctgtgagttatctcatggggcccactgggtgaacagaaaggtgtgcaaatcagaggctctcactcaacaagcatgcaaagcatgttgagtgtgcttttgccaaacttccctgacccccctctcctacagctgaaccacataacacgtaaccacagtggggcctactcaccccccattctgatgatggggaaacagaagcttggaggaagagatgatgcaactgactgctggtggcaaaaccatggtgaggcccctcctcccccaactccccaaagcggacaatccgaatacaagaccgacagagaagcccttcagaaggtcctttaataggaacagaactgaaggtgtcacacctccagctcccaagtcctcctctcgcccccaccacagtgactctttcactccacacccaggccagcccaccatgctgccatcagccagcccgcccttgggattggcggggactaggcagtaagctgtttgcttcgaactgggagtggaggaaattagagaaacctgaggctaccttgaggcttgtgggggaccctgggctctgagtctaaagctttaggagggggatgctaggtagctgcttgctttatgtgttctcagttgcctccgaagaagagtggatgggttaaggacggaccacaatgggggtgggggttgccgctgttggagtcaagatcctatggtcaggcttacatccttgaggctcaagtgctctcagcggtgacttggggaccctctggctttgaggtgatgggatcccagagtctcttcacagataacctggtgagtgtcttctgccagagggtggataggcatcccaggtccagtgcaatgcagtgaggtaggcaggagactccatcctggtccacccgtggaggaccagagcagaagactatggtggaccccaattccccccttccattcgatcctggctcctcctctgaagtgcccaggctctgtcgtgacaggctgggtcttgcacaaggacaagccaaccaagagacagtcggggaagtgacatccagcccgtgggccttgcctttggccgcacacccgcagagctgcaagagctgcacctgtcctctcctaggcctggcagaggtgctgtgtgggcgtgtgggagtctggagcctggccctctccctctgctctccatcactagcggctcacaaccatccctgcagctgtcatctctcccccaatctcccctcttctgtcccctgcctccgtttccccaccccgtccccctccccgggtcggcctcgtacctccgccttaactaacccatgtccctggtctgcagcctactggtcggcctccaccttcaccttcgcggtctccccccgcccctcctccgcagggtcccctaccccacacccgctccccgacccctcagccgccgacgagcccagctggcctccagagtctcccagccccggccccggcccgtggaagtgggtgcgctggtgcttgcggaagttggaggagttgttgaaggtgcggtcgcagagcgtgcagcggaacgggcgctcgccagtgtggatgcgggcgtggccgctaagcaccgaggactgggtgaagcccttgccgcagatgccgcaatggtatggccgctcgccagtgtgcacgcgctcgtggtctcgcatgtctgaggagcggcggaagggcttggcgcagaacctgcaggcaaaaggcttccccaccgctgcgcccgccgccgccgccgccatcaccacctccgccctctccggggccaccccgggcctctgttctgcaacggccgctgtgtccggaggcctccgagaggtgcccggctccaccccgtgccggtgctggtgccggagcaggggcgccaaggccttgaaggcgcgggggcagagcgcgcagcggtagggccgctcccccgtgtgcaagctgtagtgcgcgcgcaggctggcggggcccgggcagctgtggccgcacacgtggcaccggctcgggtccccaccctgcccgcctccctcggccccagccaagtggccatgttcgtggaacagcagctcggaaaccagccggaaggcagcagggcacaaggcacagtggaaagaacctggctccgggggctcagggaccagcgtggtgtccgtcaccttcaccacctggatctcgatgaggtcactcgggggtgtgccaggccggcagtcatcaggcaccaggacctgggcaagaggagaagaaagaggagcctgtggaacctgcctcaggaccgccccagcacgccccaattattaaagcttgggctcctctgttattttcagacagggcctcactctgttgccctggcgcgatcgtggctcattgcaaccttgacctcctgggctcaagcgatcctcccacttcatctccctgagtagctgggattacaggcatgcaccaccacatccagctagttaaaaaaaaattatttctggctgggcacggtggctcaggcctgtaataccagcacattgggaggctgaggtaggcagatcacctgaggtcaggagttcgaaaccagcctggccaacatggcaaataccgtttctactaaaaatgcaaaaattagccaggtgttgtggctgctgcctgtaatcccagctactcgggagactaagacacgagaatcgcttgaacccaggaggtggaggttgcagtgagatgtgatcatgccactgccctccagctcaggcgacagaacaagactccatcttagacagcaaaacaaacaaaaattattattattatttttaatgtagagggagtcccactatgttgcccaggctggtctccaactactgggctcaagagatccttctggctctgcctcctaaagtgctgggattgcaggcgtgagccgccgcgcccggcccatcctccaggattctgttgtatcctcatcaacatttcctctcctgtccaaaatatatcatggatcccaccttttgtcctccaccctagttaaagccccatcacttggcgcctccaaaattgaaaaacccaagggcatctctgttcctatttctgctggcttgtaacccacctcccaggaatagcctgaaggtcttttgaaaatgtaaatcagatcaagtcatttttcgcactcaaaaccctccagtggctccaaatgacttatcccaaatcgtcactataatatctgtggcgatgtagctccacttatctctctgaccccagcttaaacataagccggcacccagctgacttctctcgtctaaatttagctgccccacccctactcttggctcaatttatagaaattggctcaatttttatttcctttatagaacatatcacagtaactctcctttattgtctctctcctctcaagagactgcaggctccaaaagaacacaacccttgtctgtcttggtcacttctctatttacagagccgaagtaggagctcagtaaatgtttgttgaatgaatgaatgtcctcaattagtctaattctgagtggggtaacgtggaggaagttccaaagtcacctagaccacccacttctacccccaaattctcccttgggcattcgagaagcatcactaagacccttgaagaattatcccctaccccgacataggtgctccaatcataatcccccacgtttttcagggtcaccttcccaaccttctaccctagaattagccctagaatttatgaggccccgccccttacaaggctccacccaaattatgcaaattatccctggtaagcccccttccctggacccaaacccgtcccacaagacaacaccgtcctcagactccgcccccatccaggccccgcccaccacccataggtccctcccccaccccgcccaccatgacatagtctcctcccctgccccgcccctcgcgaaaccacaagaagccccacccccagggccatagcactaaatacctccctcgcccaccccctcataggccacgccccggacccgccccccacactacgacctcctcccacctcgagccccacgcccaggccccttccttgcccgcaccaggtccagtggctcctgggatcgcgactccggagtcggtgagctccgactctgggcctctgggcgcgcagcggccatcttgtgcccaagccccgcccccaaggccaatgttcgctctgaaagggggtggggctcgaactggcgtaagagctactgcgcaggcgcagtgcggggctgcgagggggcgtggtgcagcagggggcgtggcggggcggggcgtggcggctgagcccgggagaatgtgagttgttccctctctaattacctgtctgtccctccgagggtacgctctgtgtggcgctaggatgcctgtaacaccctgggaacaaatccgaacgttccttctaaaccaacgcaggccgactcgaggctctggctgtcaggggaacctcagcagaactgaagaagctttgctttgtttccacggtaaacgtttttgtgattacctctgcactgctcatgacaacgtaatgacgccaagtttataaacgtcggtgtaggccgggtgcggtggctcatgcctgtattctcagctactcgggaggctgaggtgggaggatcgcttgaggccgggaggtcgaggctgcagtgagccatgatctcgccactgcatgcagcctgagtgacagagactctgtcaaaaaaaaaaaaaaaaaaggcagtgtggagaaaaatattcagtaaacagcaacacaggtggtcctgggaggacgcaaaaacccgcaagctgatgttatgtttgggaggaaagagctcaaaaacgcggggttttcagcagcatcaaggacggggctcttcttagctgccccgtttagtcattctggtggtatcaccttggataagtcactacacttctctggaccatttctctttcttttgtgtagcactgtagaagcattgtgacaaaccactgagaagagacatggaagagtttggaaacatctttaaatagttttcttgaaagggcaggataggagatacttaaacatgatcctaagcatgatcatttcattcataaatatatatgaaattatattttgtgatatgttggtataaaataaagataaacaccacttaggctgaattatctcctcctcctcctttcttcttcttttatagagatggggatcttgctgtcttgccttgcccaggctggtcttgaactcctagccttaagcgatccttctgccttggtcttccaaagctatatttcccttcttttcttttgattttaaaataatttttttttttttgagatggagtctcactctgtcgcccaggctggagtgcagtggcatgatcatggctcactgcaacctctgcctcccgggctcaagcgattctcctgcctcagcctcttgagtagctgggattacaggtgcccgccaccatgcccggctaatttttgtatttttagtatatacagggtctca[131 bp omitted]ctaagagtatcatgggccctaggcactgtatctactactgtgtctaatgcttaagtcagctctttctgtccaggtttcctaatttgcaaaatgagggtgataataaaacctactttacacagttgctatgatgattaaagaagtcattatatataaagtattttggacaatgtatggcacacagcaggtgctatgagttagctataataattactaccatttggcactcccactagcaataaatagggacctttgttgcttaacattcctatcaatatctgatactcaaactttaaaatgttcgctaatctcttgggtgtgaaataatttcatttcttttcttttttttgagaaacagcccaggctggagtgcagtggcgtgatctcagctcactgcaacctccacctccttggttcaaacaaatttcctgcctcagcttcccaagtagctgggactacaggtgtgacacgtcattacgttatcgcaagtggtgcagaggtaaccacaaaaacctttactgtggaaacaaagcaaagcctcttcagttccgctgaggtcttccactgactgctagagcctcgagtcggcctgcgttggtttagaaggaacgttcggatttgttcccagggtgttacagcccagctgatttttgtatttttgttttgttttgttttttgtttttagtagagacagggttt[136 bp omitted]gagatcattcatagcacccagaactcatcctccagtttcccttttttgagagctggaagtatgtcatctctgtatcccctctgtacatccctatagagaaggcatgtatatggctcagtgagtgtttggtgaatgaatgagtgagaaattgaattcatgcagatagaagaactttgtaccagagcttaaggctattgagtattttttcccttttttttcctccccacccccactaaagctattaaatatttgcagaggagagcactgtttagtggaattaccataagctttcaaatcaggcaaacctgggtccagatccgtttatctgcttgctgtgcaactctgggcaagcaatgtctcctctaagtgtctagctgacatctacaaagtgggcaccataatgtcatttggcagggttgtagttagaatgccactgattgagaatgccaaaggtctgtgtgatgcctggaaccaactggtgctcaataaatgtgggttctgcctgggcttggtattctctactaagaatacaaaaattaacatgcacagtggagcacgcctgtagtcccaggaacttggggagctgaggcaggaggattgcttgagcttgggaagttgaggctgcagtgagccaagatcacaccactgcactctggcctgggtgataaagtgagaccctgtctcaacaaataaataaacataaaataaaataaatataaaattttaaaatttaaaaatgaatctgggttccttgccttttcacctgttgtctggcttctgagtccctcggtacctggcataacactaacaggctattgcatgacttgaggctagaagccctgctacacggagccattagacaattgcaagaagattttagccgggcgtggtggtgggcgcctgtaatcccagctactcgggaggatgaggcaggagaattgcttgaactggagaggcggaggttgcggtgagccaagattgcaccactgcactccagcctgggagacagagcaagactccatcttaaaataaaaaaataaaaaaataaaagaaaatgccaggaagagtcttggacttggaatcagatttgcctcgcttctctccatctctatcttcctgtaaaacctgagcacttcacttctcctcacggagcctagatttcctgccttttaaaagaaattggctgatagaattagctagatggctctgcagttcctctccctttcatttttctatgtgcccaagaaaactgaaaatatacattcacacagaaacttgtaaacaaatgctattcataacagccaaaaagcagaaacagcccagatgtccataaacataaacaacatgtggtatatccatagagtggaatattatttggccataaatgaataaaatactgatccacatgacaacatggatgaacctttaaagcattatgctaacttagaggctgggaagggtgtgtggtggaaggagggatgaatgaaggttggttaatgggtaccaacatagttacagagaagacatacttttttttttttttttttgagatggagtttcgctcttgttgcccaggccggagtgcagtggctcgatcgcggttcactgcaacctctgcctcccgggttcaagcgattctcctgcctcagcctcctgagtagctgggattataggtgcccaccaccacgcccagctaatttttgtgtttttagtagagatggggtttcaccatgttggccaggctggtctagaactcctgacctggtgatctacccgccttggcctcccaaagtcctgggattacaggtgtgagccaccacgcccagtccgtgtatttcaaagtagctaggagagagcacttgcaatgttcccaacacatagaaatgataaacactcaagatggtggttaccccaaatgccccgatttgatttgatcattacacattctatgcgtgtaacaaatacatgtaccccaaactctgtaaaatattatgtgtcaataaaataaaatttaaaaatatattaagtgaaagaagccaggcacaaaggaccacatattattaagattctattaacaccagaatagggaaatctatagaggcagagtgtagctttgtggttccttaggttgggtggggatagagagttggggggaaggaagaatagaggagtgatacctaaagggcatgggatctctttttgaggtgatgaaagtgttctaacgttgactatcatgatatgtgcacacaactatgaatatactgactattgaattatacactttaaatgggtgaattgggtggggttcagtggcttccgcctctaattctagcactttaggaggcagaggcaggaggatcccttgagcccagcagttccagaccagcctgggcaacacatcatgacagccatctctaccaaaaaccaaacaaacaaacaaaaacaaaaaacaaaaacaaaaaaagcccggtgtagtggtgcatgcctgtagtcccagctacttagcaggctgaggtgggaggatttcctgagcccaggcggttgaggctgcagtgagccatgaccgtgccattgcaatccagcctgggcaacagagtgagactccgtctcaaaaaaactacaaagaggccaggcgcggtggttcacgcctgtaatcccagcagtttgggaggccaaggcaggaggatcacctgcggtcaggagttggagaccagcctggccaacatggtgaaaccccgtctccactacaaatacaaaaattagctgggcctgtaatcgcagctactccggaggctgaggcaggagaatcgcttgaacccaagagacagaggttgcagtgagccgagatcgtgccagtgcattccagcctgggcacagagcaagaatatgtctcaaaaacacacatacacacacacacacacacacacacacacacacacacacctctaaatggcgaattatatatgtagtgatatgtgaattacacctcaataaagcagtttaaaaaaataatcggctgaacatgatgacctttcaggatcaaactgcagatgatatttaaaaactataaacctggtatggtaggtatatggatgtttactatgcaattttatttttatttttattttttaggcagagtcttgctctgtctcccaggctggagtgcagtggcgcaatctcggctcactgcaagctctgcccccagggttcacaccattcccctgcctcagccacccgagtagctgggactacaggcacccgccaccacgcccggctgatttttcgtatttttagtaaagacggggtttcactgtgt[136 bp omitted]ggctggagtgcagtggcatgatcttggctcactgcagcctctacctcttgggctcaagcgagtttcctgcctcagcctcccaagtagctgggaatacaggcgcctgccaccacgcccggctaatttttgtatttgtagtagagacagagtttcaccatgttggccaggatggtctcgaattcctgacctcaagtgatccgcctgcctcggccccccaaagtgctgggattacaggcatgagctgctgtgcccggcccctttttctt[132 bp omitted]gcctcagcctcccgagttgctggaactacaggcacccgccacctcgcctggctattttttttttttttttttttggtatttttagtagagacagggtttcaccgtgttagccaggatggtctcgatctcctgacgtcgtgatccgcccgcctcggcctcccaaagttctgggattacaggcgtgagccaccacgcccggtctctttttctttctttctttgtttctttctttctttcttttttttttttttttgagatggggtcttgctttgtcatccaggctggagtgcagtggcacaatcatagctcactgcagcctcgacctcctgggctcaagtgatcctcccacctcagcttcctgagtaacttggactacaagtgttcacgccatcatgcccggctgttttgtatttttttgtagagacagggcttcaccatgttgcccaagctggtcttgaactcctgggctcaagcaatcctcccgacttgacctcccaaagtgctgggatgacagacgtgagctaccgtgtctagccgccataatttctttctttttttttttgagacggagtcttgccctgtcacccaggctggagtgcagtggcgcgatcttggctcactgcaacctccacctcctgggttcaagcagttccctgcctc[226 bp omitted]tctgtgaaatgttactgctgaatttgagaaaccaaagggccttcttccaaattctagtcgtgagttacgtaaggttccttagtgaggctgaacgagtctttgaacttgagcttctgcaggctagaggaaacacagtagtccctacctgcttcttccaggttctaaggtgggtgagacattttgatattttggtctttgtcgcccccacgaggcctaggagggttccctgtcgcagcaggtgtccaataaagatcaatccgccaggtgcggtggctcaggcctgtaatcccagcactatgggaggccgaagcgggcggatcacctgaggtcaggagttccagaccagcctgatcaacatggagaaaccccgtctttactaaaaatacaaattagcccggagtggtggcacatgcctgtaatcccagctactcgggaggctgaggcaggagaattgcttgagcgcgggaggcggaggtcgcggtgagcagcgctgagatctcgccattgcactccagcctgggcaacgagaacgaaactccttctcaaaaaaaaaaaaaaaaaaaaaaaaaaaaagtgagaaagatttacttgccacctagggtaactgctggtcttctttcccccgttagtctcgctcaggaggcgggtaatctattttaactctgcacctgctggactttgtgaatgggcagtttactctctggtctcagcagccccatcgataaaatgggaataacttgtctccttgtcaacagccagatggtggtgatttgccaaatctaagacatctattttcttgccttgttcttctttattttttcctctcagttttaaaactggatagtcccaggacttctcccaaaccaggatgagttgctcacctattttgtcctcacttgtatccttaagtccaaactgtcattaccttattgaccaccagggggtgccctacacacgtagtactgtggtttaagaagacagctcaggaggaggcaaagaaagagggcccagttcccagccttgccctgagttcctacaaaccttcacgagcctgctctacttcacacagcatcatgtctcacactcagcatcctcctggccctatgatatgaacatgtgtgtggtccagtggaaaggtcttttaagtactccagcagcctctgccaacactggctaaccagctgggtggacggtcactgcctctctgcccactgttcccaacatttccaggagttggcccagcatatcctggccggctgagaaggctgaggccacctacttgattttatttatttattttttgagacagggtttcactcttgttgcccaggctggagtgcaatggtgccatctcggcttactgcaaccttcgcttcttgggttcaagtacttctcctgccccagcctcctgagtagctgggattacagtcacacgccaccacgcccggctaattgtgtatttttagtagagacggggtttctccatgttggtcaggctggtctcgaactcccgacctcagatgatcctccgcctcagcttcccaaagtgctgggattacaggtgtgagccaccccgtccggcctctttaggttatctttagagctggatatcatttccctccatcacatagccttgcagagggaagtgacatcattgttaaccaaaataagttactgaggcaagagcctcaatcactccagagcttatatatccagagcttgagggcagacctgggaaaggcaagagtcacagaaaacctctgtggcttatggaaaggttttcaggaggcttagtatttatacatttccttaaaggagggaaggcaggtgggaagagggtgacagatggaagaatgattgagctcatcgtttttgttctgtacctgggaagataagcattatcagtgggaaacctaacagactttagttttaggagctagacttagattgcaaacctaaagttacaagggacatgttcttcttcttattattatttttatttgagacagagtcactctgtcatccacactggaatgcagtggcgccatcttggctcactggaacctccagctcccaggttcaagcgattctcctgcctgggcctcccaagtagttaggattacaggtgtgcgccaccacgcctgactaattttttttttgtatttttttttttagtagagatggggtttcactatgttggccaggctggtcttgaacgtctgacctcaggtgatccgcccgcctcgacctcccaaattgttgggattacaggcgtgagccacagcactcggcccatgttcttgttttatgggaggatggaggacagcaaacaacaatgtgtactggtggtcacgtggaggtacttgaggcgctttgtttttctgtgagggtctggctaacgtgtaatgctttgacacaaggttctgaagcaacagctgttgatctgggaagcagatagcagtgttgcataactcagtctccaggcttaaccttccctttggcataatgaatttggcagccctgagacttttaaaataaaagtctttacatcctactagccagctttgactagcagtgtgatccagggccaatgactgcccctctatggccttggcgttaccacctaaccaatagggatacggtactccattttcttgccatggagcaaatcaagagttagggcctgactgtcttcaactgtctcatgagttgaagaatttcagccctctgcctttgctctgtagcaacagacaaatcactagacctttctgatttcaggtcctatttgtagaaagacttt[135 bp omitted]tgaaatccccatctctactaaaagtacaaaaattagccgagggtggtggtgtgtacctgtaatcccagctactcgggaggctgaggcaggagaatagcttgaacccgggaggtggaggttgcagcgagccgagatcacacactgcactccagcctgggcaacagagcgtgactccgtctcaaaaaaaaaaaaaaaaaaaaaaaagaaagaaaagtccttttttttttttttttttgacaaaagccatctctgttgtattccctccctcagcatccggcacggcgccaaatagtgatttcattttaacttttgtgtagtgtgtgtgtggagtagcaaggtgcgcgacgcaggaacctttctcttgtgggtgcgtttctggcccgagtgctttcctgctgctctccgaatccggaagctgctggagaagtcggagcatcccggaagtcgtcactgcggccgcttccggacgtgaaagtttgctgcgtagggatagggagaccgggccggattgcggggagtgagcaggttcagcagtgacggcattcttaagagtcctgcccaagtgagggacttggggtgtgggacagagtggcccccagggcagtgggcgttggaaactgagaggccctgcgaaggaggcttggggaggggctacggtgaccaggggacgaggtataggaagaggagggcggaaagccttgagggtgggcttcttggatcccaattgccccagaggcacaggcctgggcatcactgtattatttcccgaggggagaaggggctatttcccatgggaagacaaagtgggatgaatagtggaccttgagaagagggggtggccaggaaaaggttcctgaaggaggcaggacccagactgcaggctggggagggtttgggcagccagagggaggtgagggtgctggagcgggggtcaatcggtcactccggccggagatctgagtggcctctgccccctctgcgctgtggagtgcatctgattgccagcctcgctggaccgttgagaggattcatcgagaccctggatatgaatatgcagtgtgaactgaagtttggggacatgagtaatcagtcacagtggcccaagatttgaggtgtaaatggagaagtcagaatgattcgctgcagctgtctggaacaggttgggtgagggcaagggtgggaaaggtggctgaggccaggttgtgagaggcctttcatggcaggctgagggggttatactatagggaggattttaaaaagaggagctggtggactggtgagcagggcatataggtgacacctagccaacttgagaggtcagaatacatgattccagaaggctaaggagaaggctgccagtagaggaaaggggaagaattcccagggcgaggaaaacacataagcctttgcgtgtggagctgtgtaaattcaaggtctggccagggggctgtgagatgccgtgtgtgcttggagcacaggaatgagaagtgaggtgaggaagtggctgggccacctcacaaagggcctcaaattctaggctgagaaactcggacttggtcctgagggtaaagggggccgggagaatgttatgcatggtgctgaagttgcattcaacacagctgtgagaagcatctgtcagggtcaggccagtgtgggaggggaactggaggccagggtaccagatatggtggtccaggtgagaaggaaggggccagaacttggcttggagaacggaggtcagtgccctcagggggtggaggtgatggaacttggtgcttgtctggctttggggagtgagggagtgggtggaaatggggacgtccaaagttctagatggtgtggcaagaattttgtctagatggtgtggcttcctcatgatcatgtcttggggttgagcaggggttctctttggtggggagctgggtagggaggtaatgcttcacttttggatggggcgatcaaattcattcatgtattcattcaaccaatatcgaattgattccttaccgtttcctgaaagacctttgatagattctgagggtagaatgttgaccaggatggagctgggccttggagagtggggaaggcaggcagtaacacagcaggcagtagatcaacgaggccatatcatggattgtgctgtgggatgtgaaggaaatgaacagacggaggacgcagagcagggcacctggagctaccacggtcactaaaagctgctatgaccaagtgttctgtgagctgaaacctgaaggccaggaaggagtcactcttgtgaggggctgaaaggaacatcacagagaggggaggagctagcacaaaagctctccagatgggagaggctggtgcactgggcaagggaaagccagcaccatggtgcccagaagggaaggcagctggggggccagtctacgcagggccttgcagagtgtctgggtttactctaagggcagaggggaaggttttgatcatgacgcactgcagtctgaaactcctgggctcaggcaatcctgtctcagcttcctgggtagttgggactgtaggcaggcaccaccacctctgcctaattattattatcattttttttggagagacagggtctcaatatgttgctgtgtctcagaggggaaggttttaagtcagggaatgattctgtgagcttaaaaaatcacttggaaattgccatagggaagggagggagaaggccaggcatggtggctcacgcctataatcccaggactttgggaggctgaggcaggcggatcgcttgaggccaggagttcgagaccagtctgggcaacagggtgaaaccctgtctcttctaaaattacaaaaaattagccggccatggtggtgcgcgcctgtaatcccagctactcaggaggctgaggcgggagaatcgcttgaacctgggaggtggaggctgcagtgagctgagatcgtgccactgtactcaagcctgggcgacagagtgagactctgtctgaaaaaagacacagcaacaaaaaaaacgagaggggagggagagagtgatggaggcggaggctgctgctgctataagctgggcgtaagtggtggtggtttgcgctggggtggcagcggcgatggtgggattacagggaagtgtgtggcttgctgacaggggtcatgtgcactgacctggtgtgggcagaggcaggtgctatcctggccatcccgcctgcggatgtgtgacctcaggccaatcacacgatctctttgagctctgcttccctcatctgtaaaacagggatcctcatggtgctttccttgtagctctgccctgaggatgctgtgcgtttagcaatggctgttcccgagtgagggctcaataaatgttgcttattgttgtcattatttctggggatagcagtgggggtgggggttgtggccactacagtgccactagttatatggtctgaaactcaagagagggattgtgttagtttcattgtgtctctatgagtgaatacctgaggctgggtaatttataaacaaaagaagcttaattggtttacggttctgcaggctatacaggacgtgtggtcctggcagctgcttctggcgagggcttcaggaagcttacaatcatggtgaaaggtaaaggggtagttggcatatctcatggtggggggaaaagactggcaggaggtgacacgcttttttgtttgtttgtttgtttgtttgtttagatggagtcttgctctgttgccaggctggagtgcagtggcacaatctcggttcactgcaacctctgcatcccgggttcaagtgattctcctgcctcagcctcccaagtagctgggactacaggcgcctgccaccacgcccagctaatttttgtgtttttagtagagaccaggttacaccgtgttggccaggatggtcttgatcttgacctcgtaatctgcccgcctcgccctcccaaagtgttgggattacaggcgtgagccaccacgctcagcctgacatgctcttttaaacaactagatctcatgtgaactcagcgagatctcactcattacctcgaggatggcaccaagccattcatgaaggatccacccccatgatccaaatgcctcccaccaagccccgtctccaacactggggattacatttcaacatgagatttggaggaggccaggtgtggtggctcaaccctgtaatcccagcactttgggaggctgaggcaggtggatcacctgaggtcaggagttggagaccaggtggctaatatggtgaaacctgtctctaccaaaaatataaaattgttatattttatataatacagctgggcgtggtagtgcatacctgtaatctcagctatttgggaggtggaaacaggagaatcacctgagcccgggagttggaggttgcagtgagcctagaattgcgccactgcactttagcctgggcaacagagcaagactccatctccaaaaaaaaaaaaaaaaaagaaaaaaaaaagatttggaggggacagacatcttaactatatcagggatcttggcaagacactcaggttggataattgtctaagtagaccaggggttctcagctaggagccatgttgcctcctagaggacacgggcaatgtgtagagacattttgggttgtcacaacttggggttgggggagggtgctactgccatctggtgggtggaggccaaggatgctgctcaacactctacagtgcacaggatgggcccccacaacaaagagtggtccggctcaaaatgtgtggtggcccacgcctgtagtcccagctgtttgggagactgaagtggaaggatcacttgtgcctgggagggtgaggctgcagtgagccagaagcatgccactgcactccagcgtgggcgacagagtgagactctgtctcaaaaaatatacatactgcccagtaaaatgtttaaaaagtaccttgtgtcccaaaccaaatataactgtgaggccttttgggcccttgggcctccagtttacaactggttgacagtggtctctggaattgttccataaggtaggagccatatgtggcttaaattttgattatgggaaattagtattttttgagacagtctccctctgttgcccaggctgcagtatagtggcacgatcttggcacactgcaacctccacctcctgggttcaagcgattctcctgcctcagcctcccaagtagctgggactgtaggggagcaccactacggccggctaatttttgtacttttagtagagaaggagtttcaccatgttggccaggctggtctcgaactcctgacctcaggtgatccgcccgccttggcctccgaaagtgctggggttacaggtgtgagccaccgtgctgattatgggaaatgtaatacaatttaaaattcaggtcctctgatacaccagccacatttcaagagtgtaagagtcccacgtggctagtgactgtcatagaactttccaccattgcagaaagttctgatggacagtgctctaggatgtagctgtggcaccccagggtcttggggctcgctgtgacagttactcctcttctgtcccccactctcagctgcacctgcagatgctgctgctgccgccctcctgcgaggccgtggcgccacgtggctggaggaggagctgcagctgccccgagtgctgccgcgtgtgcagctctccagtgcggctgcagcgccaccgcgcgttgctttcgacgccggagtccttcgcatgcgcagccagcgcccgggcctcaagtgccccaggacctggcgcagcccgcgagcccgcatcaggcttccagtgggccccgtgggcagtgccagcctttcccacctccgcatctggcaaagcctggccttcgctgcgcttcggtgtcgccacatgccttctggaaatatcacacctccccacctgcgcatgcagccgtctggccctctgtgggcctcggttcccgcatgtgccccgtggaaagaacataccttccccaactatctggcagcgtctggccttctccgggcctcggcctccccatttgctgggtggagaatcacggcccggccacatcggagccaatggctggtctctggacctcggtctccacatttgctcagccggcaggaacatcccttctcccgccctctacctcggtgggtggccacggccgagcaggcagcgacggcccagtggaaagaggacaaacccttgtgggccttagggcgaagacgtaactttgcttagtctcggtttattggccgatctcttgtcaagcggcggaatcgttccgttcgggaggtgggaggggagcggggccgccgggggcgggcgtcttcagtggaccccacgcctccggtcccctccccgcagggcgctccgcagaggcgaggggtgggagcgccggctccaggcggcggaacctccgcactgggctcgcgcgcttccggccggcgccttttcccagggactccgccaacccctcgcacccccgcgcccccagtccccgcgtccccggcgccgccggcccggagctgcccggaagtctcggttccgccgccggcgctcgccaggggaagcccggggccgcccgggacctcggcccgttcctccggacccgagaggccgccgcacggggtacgggggccgggatggagggaggagcctggccctgggacgacgccggggccaggcaggctgggggagtgcgctggagccacccgggatgggggtgggggtcgggagcggcaggatcgggcggagggacgggaggggaagtcgaggcgccagggctccttggggaagtgaaggcaataggaggggccccagggccaggggacaggcggtgtgtagcgggatgggggcgaaaacgcccgggcgctggggttcccataaacaaggggagcagagcaaaagaacgggcgggggaccacgctgtgtgtaacagggagagggatggggctcctggaagaggtgaacacgaggagaaagagagatgccagacgtacacagaaaggaggggaaagtgggcttgggagaggtgctgtgggaagcggagtcccggagcctggtgtgcataacggggtttgggagaaggcccctgatgggtacagaaagaagtaacgatgtcaccgccatatatggggggcgagagaaaagggggcctttggggagaatgtagcaggtagccaggttgggggggcggggtatacagaaggaaggcatttgagccattttggggtgtatagatgtagtaagacgatgggttccgtagtggggagaggtgactagacttcgaggtgctaagtgtaggaacaggatggaaaagccctagtgaaatgtggggaattgggttagtggggctctggggaggtacctagagaggaagtgagggaggccacggaatatgaagatggggaggccctgcggcatgtagtggggacggagggccaggaggccgatacgggggccggtgggggggtagggggcggcaaagggaggggaagtaaactgaactggggctgggcaacaggaaaaaagaagaaaccacagattagagaaatctcggcggtcaggaggcccggggtctaagatgtaaagaggtaaacagatttagggattgattgtctgctggggtgggttgagaggagaaaagggaagaaaagtcgggggactacgtcctcagacctgacctgagtggtgagaggtggacccaggaggagtggcaggtggtggcggggttttgcagagctcagttggaggccctctccgaggcagcttgatggaacgtgggagagccgggctggagtcacagtttttattttgctagggaggtagtcagtggcgcacaaagggtaacaagcagtgatagtggggatgctttccattttaggaaacttttcctaaaaggaagtggcaattttaactaatctcccctccgccgctcccagctgccgctccagatgctgctgctgccgccgcggccaccccaccctcggtcctcctctccggaggccatggacccaccgccccccaaggctccccctttccccaaggcggaaggcccctcctccactccttcctcggcggcggggccccgacccccgcggctgggccgccacctcctcatcgacgccaatggggtcccctacacatacacggtgcagctggaggaggagccccggggcccgccccagcgcgaggcgcccccaggagagcccggccctcgcaagggctacagctgcccggagtgcgcccgtgtctttgccagccctctgcggctgcagagccaccgcgtgtcgcactcggacctcaagcccttcacgtgcggcgcctgcggcaaggccttcaagcgctccagccacctgtcgcggcatcgcgccacgcaccgcgcccgcgccgggccgccgcacacctgcccgctctgcccacgccgcttccaggacgccgcggagctggcgcagcacgtgcgcctccactaagctcgagacccggcctgtgctgccctgcccgtctcagggccaccaagtctgacccacacagcgtcactcactcccacacacaccccctggctctgctgaggttactgccttaccctgggcctcagtttccccaccttccaaagggaggagcatcattccttccttaccccctttctagctgtgtgatgtagaccaaagtcgttgcccctccctgggcctgggaaccagtcggaactgggttccagtccagctgtgctgtgtgagcctgtgcaagtgacatgacctctctaaaccttggttttctgctctctggagcggtgaaccggtggttgtctgcggggaagagatgataaagagcacgggcacggtctggttcatttctgtatctaccccccttccgcccacgcccccgaccctttgctcaataaacattccgcactccattttcaggctcttccttgcgtgtgcgtgcacgttgggtgctggggggtggagaccggatcttcctcgcttgggtactttcctctcggtgtgtgtttctggccggagccgtttcgcgacggcccgggcgccccgccccaaccttccttccctagaccctcttctctcccttcggcttctctctttcggccggcgccgccagttcctggggcacacccagaggtccccttctcgccgccgcctgcaactgcgagggtagcccggggccgcttggagtcgcccggacctgagaggctgctgcactgggtacgggggccgggaggaggaagggggctgggggcgggcggcgggaggggctggaccgcgtggagggtacctgggccggggcgggagtggggcagacgccggagggggctgttctggagcttggagggggcgagaacttacacagaaaggcccagaaagcgagggctgcggccccgggggtggaaccccggagagcgctgggacctagaacgagcctggtggaggccgggcgaggactagagagaacctgaggtgggtggacgggtgggagcacggagttgttcagacacgtggctggagagagggccggaacctgggggtcctaacgtcggagcccctgtgaataggcttggcttgtatggagggggtcaggaaaggcttgagtatgtagcataggccaacacgcagaccctggaaagggctagaaggaggggagggagaggcctggaggcctgcggggtggggcacccagtgacctgggagggcacaaagaggaaggttagagcgaggtccaggttgtgcagaggaggtcaagagatcctgtgagtacagtgtatggtggagcaccgaggctaggagaggttttccaaggaggaagaccctggggaccttttagggggccacagactccagctgtgagcgggactggaaaagagggactgaggggcagcaggatgcagaggtcctgggccgggtatagggagggaaaaggatggagcctgtggtgctgagctgccctcttctatataaccttcttatcccatctcccatccaccaggcctcagccagccctccggatgctggtgctgccatccccctgccctcagcctctggcattttcctccgttgagaccatggagggccctccccgtcggacttgccgctccccagaacctggaccttcctcctccatcggatctccccaggcttcatctcctccaaggcccaaccactacctgcttattgacactcagggtgtcccctacacagtgctggtggacgaggagtcacagagggagccaggggccagtggggctccaggccagaaaaagtgctacagctgccccgtgtgctcaagggtcttcgagtacatgtcctaccttcagcgacacagcatcacccactcggaggtaaagcccttcgagtgtgacatctgtgggaaggcattcaagcgcgccagccacttggcacggcaccattccattcacctggcgggtggtgggcggccccacggctgcccgctctgccctcgccgcttccgggatgcgggtgagctggcccagcacagccgggtgcactctggggaacgcccgtttcagtgtccacactgccctcgccgctttatggagcagaacacactgcagaaacacacgcggtggaagcatccatgagccgggctgccgggtgccccaggtaccacaggactttgcagggagcctggactcctgtccagacacctggtgagagcctgaggctggtgttcagggccctggacacagacacagagcagccgcatctcaaaggcagagccctgcctgaaggaggaatccgtgagtaatcttcaggtcctccgtgttctggagctgagatgggaatgagcccctacacagaatggagtcctctagcctaaagatatcagctgttccatggcagagccttgactggatggaggtggggagtgtggtgtgtaaagtctctggcctcataaaaggtggctgtgggtcgtcaggaatctgcgccatcttcctggggcttctgcgctgttgttggggaagggaccccagtcctgccttccaccccccaaccaggcctgagactgatcaaacaataaacacgtttcccactctgagcactcgaggtttgtttttagagacagcatctcagaccctctttggtggccgtctagcagggagacctcagcttgcctggctggggaatgggaaggttggcctgccttggggttatcccctcctcagctcctgaagacctgggtcatctgggaagaatgtttttaactgaaacaattttaaaaccacaatctcctgttacaaacacattttatatggcaatagagtatacagataagcaaaatacacgtgaaccaagtttcctttttttttttttgagacggagtttcactctttttgcccaggctggagtccaatggcacaatctcggatcaccgcaatgcctcctgggttcaagcgattctcctgcctcagcctccctagtagctgggattacaagcgtgtgccaccatgcccagctaattttgtatttttagtagagacggggtttctccatgttggtcaggctgttcttgaactcccaacctcaggtgattcacctgcctcggcctcccaaagtgctgggattccaggtgtgagccacagcgcctggcctctttttttttagacggagtttcgctcttgtcacccaggctggagtgtaatggcgtgatctcagctcactgcaaccttcacctcctgggttcaagcgattctcctgcttcagcctcccaagtagttggggttacaagcgtgtgccaccatgcccagctaattttgtacctttagtagagatgggtttcaccgtgtttgtcaggctggtctcgaactcctgacctgaggtgatccacacacctcggcctccctcagggcacta[132 bp omitted]cctcagcctcctgagtaggtgggactacaggcgcccgccac[138 bp omitted]cccggcccacaaaaatttctttaccatagttagctttagtttgtgcatttttttttccatcaactattattattactatttgagacggagtctcgctgtgtcgcccaggctggagcgtggtgcgatctcggctcactgcaacctccacctccccggtttaagcgattctcctgcctcagcctcctgagtagctgggattacaggtgtgcaccaccacgcccggctaaatatttttttaaactgctgatttcatcctattctattgaattctccacccatgaacctgtagtttggaaaagaccaatctagggcagatggctccccctggaatttttggaccaggctgcagttaatctgtaaagtggggaggggaggatcatggtcacagctttgcaggcggtgcagacatttagattctccctccatcgggttaagaccttgctcttataagggctggccacagtccagagcttggatgcttctggtgaacaggagaggcaggtggagctgagcctgaagcttaataaacatctgcttattcattcatttttcttgcctattttgtgccaggcactgtgctaggcctcatttgctcttccgacctgtttttttgggaggaagaacaaatcttccgttcatactccccagagtgggaaagagcctcccagaggctgccatcataccccaccatctgacctcaaataataccagcagcgctcctctcttcagccctgacgatggccaggtgctgggctgagcttctgtgtgtcgcatcactgcatcctcacaataaatttagaagggcttgtaatttccccattttgcaggtgagttaacaggctggggaggagcaggaacagtcaggactggaatctagctttgctccaaagccagctcttaattaccaacatggggatgggggtggcgtgttcctggccctcattttccgggagaggggtaactcccccgattttggcccccacatccctgagaaccttggggtctggctgtaggaggtaggggagctctgaggggtccgcgctggctagttcctgagagagcgttaaaagtagattctcctttcgctccaactttctcggtgtctcaaacactctcctgccttctgggcccattgggcacaccgccacccaatccggggacccccggagactcgccagctctccaggatgggaatttcgtgatgttccctgcctgagcttcggggagggcgggggagtgctgtaaggggctatcgcgcaagtgcagaccctctgcttctgccgcaaacggcgggcctcacctggacccggggactcttcaacgaggggcgctagcctggcccgactgggcgagtccccgcgtccctgcccgttccgtcgctcagttccacgacacgctcccctgccgccccgcctgttcgcgggtgggtgggcgcttccctcggctccccgtgacactttgcagacgctccccggcgccgggcatgggcgccgccgccgtcggtccccgagccggattccgcgagcgggtgggtgagcgcggggggcctcggcccctcggaccccgggcacccgcgggcgggggatggtggccgcgtttgcacccccgccctagtgcatgttcccgctggaatcgttccacgaccgctccccctcccacccgcgggacaaagggcgggggcggggggggcgcacccccacgcgtgacctttccccgtactgcgcacgcgcccagcccccaccaccgggggacggtccgcccgcccacgcgagtgcgggggaggggtgtgggggccccgaaggtagaggaggcagcgcgcacgggctggacctcctcctaccctgggaagttggggcagtttccccctgcacctgcctcttccttaggcctggcagtggcccgcgatgagagagggtccttccccttcaggctaggtgtccctggtcaggcgaccccttggggcacccagcaatttagggcttcagcttccttttccttcgatacccaggagcccacgtccccagctcacttctcccccaggacctaggcggctgggccccctgcccctgactccaggagcccaggagtttgaagcccaggcgcgttttgcctcagtcctggggtccaggctccctcctccctcagaccaggggtccaggccagaaggtccctcctgtctcacttcacctcccccaggatggaccctccagtccatctgcgtctctccatttgtggctgccgtttctgtccagtgcccctgaggccctcggctgctggggtccgtaggaagccgcgccatgaatgaccggagcagtcggaggcggacaagtgaggaagctgggtccccttccctaccctgggtcccagtgcggtcggctccaggctgccgtggttggggggtggcctgagaggcccggggaattctctggggtaacccggggcctctcctctccagtgaaggacgatgagaccttcgagatctccattcccttcgatgaggcaccccacctagacccacagatcttttacagtctgagcccctctcggagaaacttcgagggtgagctgagggggtgtggagggactggagtcagctgggaagccaagccctgagtcccagggtgtgacctggtccccccaccctcgctgtgtccctagagcctccggaggctgcgtcctccgccctggctctgatgaacagcgtcaagacccagctgcacatggctctggagaggaactcctggctgcagaagcgcatcgaggacctggaggaagagagggacttcctgcggtgccagctggacaaattcatctcttctgctcggatggaggcaggtgtgtgtggggtgctctgatccacatgcctccctgtcccgctactgggtacccgctcacccagactcaaggctccactgtttggctggctgggtgggacctgccatgttggccctatctgctagtcccctgcctgttttgggcccccaggcccagctgcctcctcacttgattccagggcctcatccccatgaactgtctactggggcccgtcctcctgccttctccgtcagctccccaaatcccatcagcctccagtgccctgccatctgcttccttggcccatggtgacttcagggaccctggcacctgagagcccctctcttctgactcctagggggaccttccttcatctctttggccaagaggcccaccctagttctttgggtttcctcagggggcccctgctcctcctcccgtccctgtcttctccaagatccaagagtccagccatccggcctcctcctgtccccccctcccctctgtgacaccaggggccatcttcccacccaccctgtcccatccttggttaatgagcactccttccccatcaaagacattaagtcccttcctttgtgggcctttttgggtggtgaccccagcaggtgctgtccctcaaaccctgcctgattcctgggcagtccccacccacataccttgctctgctataattcatggccagaagcagcccagatagctcccacagcagcacccagccccagccagttcacagctagcgtcttctcttgactggtgggaccctgtgccctgtttaatacattttggaccccagccccatcctcttccccggatggtcaggccgtttgcccgacagcccatggcctggagaacccacactctaccccacctaccctcatctcagccttgctagctccttggctgggaagacccctcaaaagctcccacatctctctttgtgaattcaaccctttccccaaaaatcctaggcaagggggctatggtcttgtggtgtctctgttactggaagcccagcatctggggatctggctttccctctgctcgggaacaaaccacctctggctgcccttgggcctgccactgtctcctctcactgatggttccatcctgggtgactgactcctttgcacagacagtttggccctgcggcttcggcactttcccagtggggaccctggcaccagagccctcccctaacccgccttctagaggaatctgtgtctgggcctccgcctgccggctccctctgtctagatggaggtgggacccagcctgctggacccagggcccctgatttctctcggtctgaccccccgactccagccaaggccttgcctgcctcctgggtttccagaggctactctccagaggtcccgcccagtccccagaaatttctccctcccctatgggaaccgcgcatagtcacaggggtcctgaggcccctggtcggctgcctccgtaagacctcttgccaacccaggcctctgagaaaatgctccacccattaccacctcccacagaccccaactggctctactcagccaccagcgtctctaccgtactccttgtctctctgtctctttaggggaccagcccaggttgggggatccagttcggggactgcagcctctctcagtcccgggacctgtgatgggatgtctggtcccttggttcatgtgtgtgtctccatctccccagaggaccactgccggatgaagcctgggcccaggcggatggagggggacagccgtggtggggctgggggcgaggcctcggaccctgagtcagcagcctcctccctcagcggagcgtccgaagaaggcagcgccagtgagaggaggcggcagaagcagaagggaggtgctagtcggaggcgctttgggaagcccaaggcccgggagaggcagcgaggtgagtggggtgcatggggcgggcgctgaggggcccgggctgctgaattgctgtgtgtccttcccagaggtccccctttctctccaagcccctccagccttgctggagaaagacccaccgggttctgtctctccctcctccacgtgtggtcctgggtttactttcttttttttttttggcgggggggacgtcttgccccgtcgcccaggctggagtggtgcagtggcgcattctcacctcactggaatctccgcctcccgggtccacgccattctcctgcctcagcctcccgagtagctgggactacaggcacccgccaccacgcctggctaattttttgtatttttagtagaggccagggtt[145 bp omitted]agggccaccttgggcacctccttaactttcatcagtaaggaggaggtgcgcagtaggacctacctcacggggagggtgagacttgaataagtgaattcacctgaggcagggagacgagggtgatggctcggggtgtcggggggtgctgggaccgcgtgggttgaacccggcctcttggctcattttgtctcctcactctccttcctgggcctgcctcttcccatttcccactggtccaagatctggctgcgattcttcccctcctctctgccccttccttgcctgttgttctccgtctccacctgcaccggcccgtgcctctgctcgccgagatcctttcttcccatggccgtttcccttcccgtgtccgccccctcagtcttgtgccctgcccctcactttcgtgtccccgcctccacccctcagtgaaggacgccgacggggtcctctgccggtacaagaagatcctgggcaccttccagaagctcaagagcatgtcgcgggccttcgagcaccaccgcgtggacaggaacaccgtggcgctgaccacgcccatcgccgagctgctcattgtggcccccgagaagctggccgaggtgggcgagttcgacccctccaaggagcgcctgctcgagtactcccgccgctgctttctggccctggacgacgagacgctcaagaaggtgcaggcgctcaagaagagcaagctgctgctgcccatcacctaccgcttcaagcggtgatcgcaccacgcctccgcgcctccacccgggccttcctcccccgtggaccccggtggatgacctgcccctctccccgccgcgcccctgcccctcctcctcgctccctgggttgggggctcccttagccgggcccccaagcgcgacggccccggaccggccgcggccccttcccgaacgccggcacccccttccgcttgggctgcccagccctgtcctcgccgggccccttcctcctggaaaaccaggcaggcgggtgcccccccctcgagtgggggactgtacagaccccgtctccgccctggccccgcggaggagctgcccacctgattcccggacagacctccccaactccgcgtgagacagagaattattcagataatttaaattaaaaaacgacgtgaaaatttggaataaacttggcctcagcctcttcctaggagggggacgtgcctgggagggggcggccgtcgccccgaagacggtgacggggttgcgggggcttccaagggggtgggtggtcaggcgggaggacgggtaggatacggtgtaattagccccccggaggcagagatggagagtgaagcagctgcgcccc[359 bp omitted]cccgctgggctacccagaccggagcgcggcgcgagaggcgtgagtcgatgacctctagcgagggaggccacctagcggccaggccaagtctggaggatacttccgttgggccgccagggggcagtaacgccagatcatctgtctcccggaagtaatgccagatgatccgtctgccgcgcctgcgcggcgggaagagccggagcgcgttgatgtggttgccgagacaaccaagagggtggccggatttaacggctggggattaagcactttcaccgttgtaagggaaatctcgcgcacgcgcaatggggactgaaacctggtccccgcaacccccttcacgggagcagtgggagagcgcgccacagaacgacttttacgcaggcgcagaagcctgtttcccctcacccgcggcttccaccctgcgcaggcgcaaaaagccgcgctggcaacctccgcagcggtcgcgcgcacccttcatccctcttgctgcttttgtctggcacaaccttctcaggccctccgcgaggccggccctttttttctttcactttccccacccggagagccaggtgccgagaactaggacctcgtccccttctctatcccttcccctgatccatctcgtctctgttctccttcccttttccgttcccgaagccggaaggagccgaggtacccacggaaaaagtcgaagctgtccccggagagtgaggccttcacgaagcggtggcggaaggagccgaagttctctgatcggaggcgtgagcaagtggcatctccggaaagagccgaaacacggactcgagcttaatcccaggaggggcccgagggcgagatccggaaatctccggaaagagccgaaggccgggacggttaggattgtcggaagtggccgattgcttggacagggccggcggagaagatcggagcaagtccgtggaagaagccaaagactgggacggattgaattgttggaagaacccgaactcgcagaggggactgggcgcagtggcacacgaggacacacggaaacctccgaacgttgaggagataatctcggaaaagttacggaaacctgggaagtcggcgaaaccctacgttcgggtgttttcggaagcagccgaagcggccgcctgcttcgccttcgtccagtatccggagatagccgaggcgcttcggagccaggctcggggggaggggcaagctcgcgggcgggcgggcgggtgagggggcggagcccgggcggggcggggagggctgccggaggcttgattaggtaggaggtggcgaagcgccggcggcggccggaagtagccgaagccagcggcggaagtagccgaagcggctggagcgggcggcaaggcgaggcgaaagctgcacagggccctacgcggccgcctcagcatgtcggacttcgacgagttcgagcggcagctcaacgagaataaacaaggtgagggcaccggggtcgcggggcggaggtgtgggcggctcctcgcgtcgctctttgcccccccgccattttctccctcgcttccccccacttcacggccgcgcggcgccccccaaccctggttccgtggcgcgcgcctcgttcacgtgacgtccccagcgttccgccgcgcgctaggcgaggggaagggggcggcggggcgcgggcccgtgacgcatgcgcacggcggctgtccctgcgccccacgtggtcctggcggaggtggcgcgggggacgcggcacgagcgcgccagatgcctcgacgtgaacttttgttttttaaaatctttttggtttctctgaaaaggagattatgttagtccccgtaatctcttttctcccgctgccttggcacttccgcttccggtcgggcccacggcagcgtctccacgccccctttgtttccaaaatggcggttgtgagaacttggtgggggggcccctttccttccttcacgtggatgagggcagagccgtttcggcggatgcttggaggccacgggcccctcgcgtaccccttttcctttttgctgatttgctctgatctctcccgccaggtggtttctgccccgtctgttggtagtggggcgcctcatattaacgtgtttggcacatgttgcctaaaagcatctgcattctttgagtgtccgcacgcacacatcctgcatatgcggggcttttggcggtcccgagaatcgcgatatggagtgtttgagacaaacctcaaatcatttacaatcccaatctcagggcacctgataatactcagtctcagatctcaatatagagataagaaaacaggttctgagggaggaagagggatctggcccactgcgctaaactcttcacttacggggaaggtgggaggcaggttcccttcagggtatcgaaaattgtgatgggttagaacaaaaagcctggggccctgatcttagggattccaataatattagaagtgggagagttgttaagacgctttaaaaatcctccgtgtttcagtttgtgaagaaatacaggaccagggaagattggagacttgtttcttttcaggcttcagctgcccatgttcctagctcgttcggaggacgaaatgagggctgaggaattttcctttgaacccgggctagagttgggtaggggctgtattaggaaacagtgtcctggggaagcaataacgtttactgagggtctgactctgtcttagttgatggactgctcaagagcataggctttggagttgagcacatcaggaagtttagatacctgctttgtcgtttagtaactgcttttaatacgtttatatatttttttccatttgtagactgattattattttcttgttaccggattttgagaagattaaaaaggatgatagtaacgatagatgtagttaaactctgagcgcttaccgtgtgccaggctcttcgctaaactcttagcatgttttactaagtggatccttttaacagccttgtgaggccaaaatgatttccacctctactggggaggaaactgagggctcagaaaagttaaaaactttctcagggctcagctagtcagaggcagagctgagattaaatggggtaacatgtaaagtgtgtggcatgtggctttgcgtacactgggtgtgcagtaagcgatatttgcaattgtaaaattccatgcttagagaggagggtcttccgctcacagagattgtgtcagagttgggaaagggcaggaaaaggtgctttccaaatgtcattctgccacacaacacctggatggagtagatacgaccctcgtttaaagagaaaaccaagtcttaaaggctaagttgcttttgcatggtttttgttgttcataagcagaaaagcaggtactgattctgagctctggctgcaaggccaagttccactctgctggaccaagtggagctgattgggcggttctttgaggctctcagatggtgcttcaccggttctcccggggtttcccttttggtgctggtagggcagtccctgagacctggcacggctcctgggttggcggagctgctcccataagatgaccacaatacagtgttttgagcaaacgaagctctcattgtttttacctgtccagcatcagtgtgtgggagagggttcttgccataggggaagctctgcccgcgtgtcactgcctgtagtctttgtctctgcggaggacgggccagcttctgtacgtgtcgccttctgcttcagtcctttcctctgctacctgtatctacagggaatttccttgtctatatcccaggcacccagcgggcatcattgctttctctgcgtgggttcctgtctgcctgcttgcctgtttcagagccttagcagcagaaagggctcttggggctcacagcctgtccatcttataagcgaggagctgtgcccagtgccgtgcctgtgtgcccgctgctctacactgctggcctgtcctgccgattgttcctcccaatttcagtttttgattttggggtttttggccttcaaggggacaattatattgtcattaatggttctagccagacctgagtgttctgcctgatccacattcgagagtatggcctcgtgcttaactcactgatgtcagagtgtttaaattctggtgtcaccatttcctagctgtttgaccttggtaattgtgatctctctataccttagtttccttacccattatgtcagcccccagcagtgtttttccgaagcagtagtgaggattaagaacaaacaaaacaatttagtacagattccggttgtaggaagcatctcaatatttgttgctgtttttttccctgctgggtgcatatttttctgagtgttggtggttttggaattgtgatgcttttccagacattcacattgcatcgcaaaaacgtgagacaaaacactgtgggtgaggctgaagtttaacatcctccctcagtgccctttcctcctcttgtccccagggatgatcactccaggagatgcgtgttaacatatataagcaccttaacgtgtgcatctgttttgtgtgtgtgcttcatggctagctgagaaatctgggtgtctttgaattaaggaaatggtgtggcggtgctcatgaacccccccgcccccccatgctcatggtttatcctccatcttgaagggccggtctctcttcaggggttgaagggtctggtgagagcagaggtttctgtggttttgccagtgaggctccgttcctagtggctacctcaggcaaatagagggttgagggagcctgctggaggctggcagagatacccgcccctactcacgcctttacagtctcttcagtacttggctttgaagggagtgaggctgagagattcaagtggtttgggattcaagtctggatggggcaagctcctcccctgacctgctgaaggagaggagggcctctttccccttcagtctgcagattctccgaggcccttctcttcccctgggaagggtgcttgcttctgcattattcaccggcttgggaagggatgggttgagtttccctgcttcctggggatatcagatcctgcctggcacctgacccctagtcctgatggtggggctgtgggtgccagctagttgcagaggtctttcctgaggggtcgctgggtcccttcaggaaaacatcattgggtctcttgattccccagcctctagccctgcccctctcagggacgaccctggggtcaggcccctcagccctcgagggggaccaggagccagcctcctctgtcttctctggctccccagctcctcctgagcatcctcaggtatcttacaccccgggggcatttccaggccccgtccccctggtcccctcatggtccctggactcgcttgtggacccaggaggcctgttaattcccttcctccattgaatcccttccctttgggggtggcctccctggggcttgggacatagccaccagcgcgcagggtgggctgggcccgcatccttactccgcttatcccgtgcccctcctctcacccttgcccagagcgggacaaggagaaccggcatcggaagcgcagccacagccgctctcggagccgggaccgcaaacgccggagccggagccgcgaccggcgcaaccgggaccagcggagcgcctcccgggacaggcgacgacgcaggtactagggctcagggatcccctgggccagcctgggagtcggggggtcggtgttggccggcctgtgggtggcctgtgtgtgtctgtgtctgggtccgggccctgtgtggctcgttcgttctttgtgtggatctgggggagggatctactgcttggtctgtcttggattccgattttttcccccgtttctggggtttctttcattttctgtcttggtggttgctggtgggttgctgggggcaataggctctttatctggagcctgggaattgattctgtgttttccttcacaaggggttgttctctgtctctgactctgagggcctgttccttcttttcgactctctgtggctctctgtgggactctcttcgagggggttggtctctgcctccagtttctttcttccctgcctcccaggagaagggagctcttgggaccgaggcagtatccacagcctgggctgactttttggcccaggggtgtcggtttccaccgcctcttcccttctaggctcccctttctgttctctgcctccttaggtgaggaagggcaggataggcggaagtcctcctgcctcctcccggctcagtttctccagctagagactggtccttcctggcccctggcccctttctcctttcctcacttcctctttcctgggggtgggagtgtttggggggaaatggcagggccgagggtggcctgcttgctgcttgttgacctcggccctgctcccaccctggggctcagtgcccttgggggggtgtggcatgtggggaagacgagggtccccagtcacccctccccatacctttccctcccaccccccagcaaacctttgaccagaggcgctaaagaggagcacggtggactgatgtgagcttctcttcctgccccttcctccctgatgtccactcccttcaccttcctcacgcccgtgcaccctgtcccgcccatttccagccctggcccaagcactgggaagagtccacttaccttgaaaccagcacccctttcccaggccctgccccagaccctctccttccctggagagagtggagcttacatggttgcggggagggtgaaagggtgcctgggagggggctcgcaggcccactgttggtcagactgaggttgccctgccccgctctcccctcccacctcccccagtcgttccccccgccacgagaagaagaagaaggtccgtaaatactgggacgtgccacccccaggctttgagcacatcaccccaatgcagtacaaggccatgcaaggtaggcccctggccaggctgctcccagagcgggagggtacaggggttgggattctccgtcagtcattcccctgcgtgtgtgcttggagggggtcaaagacacaggtagagggttgcacacccctgggggttctggtctctgcgcttttgaagcctccctagaggaggaaatgaccagagacacccgtggttgacaggggaatgaggcctccatctggacgccattaggaagtgaggcttctgaggagcagcagttactgggtgggggccccgagggtggaaagagggttctggaaggtgctaagaccgagagcctgtaggagctttctgctgaggaggggaactcccagtgtgtggtgaggggtggtcactgagcattcccctgatggggttttatccggcttttattccctttgaagctgcgggtcagattccagccactgctcttctccccaccatgacccctgacggtctggctgtgaccccaacgccggtgcccgtggtcgggagccagatgaccagacaagcccggcgcctctacgtgggcaacatcccctttggcatcactgaggtactgccctcccctgccccctaccctctcccttgtccctctaccccgttcctccccttccctccattccctttccccaacctgcacgggtcagactctgctcctgcaagaccccccggccccctcccagacggaccgatggagttgagccagccaggggccgggctgggggtggccctccctccctcctcttcccctctcccgtctcccctccccccaacctcctccagcaacccagggatcaagcacacacataatgtacccacgtgttgtacctacgtgtcggagagagacagagagggagacttggacacacacacacacacacacacacacacacacacacacacacagacgcacgctgcccctcagtttttttctgacacgcctctcgttctctgccgcctgtcccctatcctctcccccacgtccctcccatggtcgctgttcttttatttttgatcgcccctgacctcccccttccccaccactccttttccctctcccctctccccaaccccttcctgtggcaccccctgagaatcccgagatcaaagagttgtttccatttctctttaaagtgaaatattgtggggctgagatccctcgtagcaacaaaaagtttgctaccatcgtcgaaggcaagtaaggtccattctgactttctcaacctgcactttgctacatttgataaaccagcccccggactccagggccagattcctccacatcactcttttctcctcccctcccgtccctgcccctcctccctacactcctcctctcctgcccctgcactcttgacttcctcctcctcgctcgtctctgtcctgctctccctttctgtcctttgctcgtctctgcccctgcctgccacttcctttctactttcctgccacttttctgtctgtctccactgggtggcccttcctgtgtgctctgtctcttcatctcttgtgtttcgtgtttttcttcattttgtgttgtcatcatgccctctgccttttcttgaacaatcttctcctttcccctgattttttggggcccctgtggctgtcccccaacgcctgtccatcgcctgcccttggccgtctcttgctactgcttcctccccattttctctcttgcttctgttcttactattgacttctacacccccacccatattccactgttccttccccccctcctccctcccctcatccctctccccttacccccaaacccctctgtgtctccctctctcacccttcccctcctctctccacctcccttcccccgcccccccccttgtctcctattccctctgcaggaggccatgatggatttcttcaacgcccagatgcgcctgggggggctgacccaggcccctggcaacccagtgttggctgtgcagattaaccaggacaagaattttgcctttttggaggtgagctgggggagtgagtgaggtccaggaaacgtgtgtgatgtgagggcccagcccttaggctgatgttgtgtggagctgccttgtgctgtttccaccaggccctctgcagcctcttctccacccggtcgctgaagtgagccctgttatagcattacagatctgatcctactttctgccttccatttgctttctgtgtgacctgagaggcctgtttggcctctgtagacctctttggccttttccagaccattccggcccagtcctctctgcactctggccacactgaccttcccagaacctaccatgctcctgcctgcttggctagagttctttacaccagctaactgatgttcctaactagtcttctgttaccccagctaactgatgttcctaactagtcttctgtgtctgtgtttctcaactgtcgggaaaaggccttggtttttgattttcgactcttggtggactgataactctcatgaagtattgtgaaggtgtgggcagtgttagcttactgcagagatttctgagcactccctctcactgtctgagcactccctctcactctgtccctctcactctgtctttgcctcactgcagtccacttgcagttgcattgctccggagatgggctgaaatgtccccctcaccagaaagactccagtactgtcatctccccgttcaactaacctttcccgtaacatcccttttcagcactttgtccctcttccgtgtcatcacagcctgcaattgtgtgtttgcctctgtgtttgtgttgggtgcctggtgtttttaatggtcgagtgtgagctcctggcagcagggacatgcgtgtctgttgtactcccagtgcccagcctggggcctggcatgttgtatttgttcacatgagtgaaaggaaagaggaaatcccaatcctggaacactaggggctgtactagtccctgacccccatccctcaccactcctttctctttcattcagttccgctcagtggacgagactacccaggctatggcctttgatggcatcatcttccagggccagtcactaaagatccgcaggcctcacgactaccagccgcttcctggcatgtcagagaacccctccgtctatgtgcctggtgagtgggggatccattaagggcccctttctcccccagtcctgttcccatggcctgtccatcccttcagcccagctggagtggcttaggaagttgtgtaagtactgtggaagataggtgccttttccctgcttcccctaagtctctgtgagtggggtgctctcctgctggtagagaaggtgcctagggccgggagaatgagctgtcacctgctgaggacacacagcttgtacgtggcagagccaggatcagaccaaaggtgctggggaagcgaggggcttgtggcctggacctcgtgcctgcgttgcggctgtgggaccttggagggctcagtctgtgcccgtcggggctgctgtgtgtcgacggttggcagcaaagctgctgctgtggggtctggcacctgggtattcacttgtttttgtctcctagtgtttgccttgaatcttgtgttctgggccattccccatagctgtgttgaacatcatctgtaattggtaggtaacatagcagaccaggggttggcgaccatgtcactgtgtgtgaaagcagccggacggtgtctgcgtgcgtgggcctggctgtgtgccggcacacctcgacacgcgtggctgctgaggttgggctttcctgtgcttctcacaggccacagaatggtctccctttagaaagcttgcaggatgtgcaaaaccaggtgatgggccctgtcagcccacaggctatagttggctgacccttgtagctgatgaatgggatttgagggagggcttgtctgatgccctgtcagggtgcggctgtgtctcaggcctgggacatggaggaggtggggttctgctggcgggtactcactgttcgaggagccctttaggaactgagtcagctcttcagggcaggcgatgtggagccccagacggaggcacatctgtgtcaggcaggacttgggctaggtccctcactggcctccagtgcttttctttttgttgttgttgttgttttgagacagtctcgctctgtcacccaggctggaatgcagtggcacgatctcggcttactgcatcctccgcctctagggttcaagcaattctcctgcttcagcctcccgagcagctgggattacaggcacctgccaccatgtctggctaatttttgtatttttagtagagggtgggtttcaccatgttggtcaggttggtctccgacgcctgacctcaagtgatccgctcacctcagtctcccagagtgttgggattacaggcatgagccactgcgctcagcccagtgcttttccatcatgggttttggtaaattcagctaaccttttggagcctgtaatatatgttgacatgctcccaatcgacatggactttttacgtatgggtgcgtttccccgatcaagctgcagaatgtcttccccacgtctcttcctggtgaatccactgcgttttcattcattttaagtcccatgagtggcccgccacttgctggtgcttagtgtgtgtcaggcgctgtcctaagtgccctccatgcacggcagttctacgacacagggattggcgctgtcctaagtgccctccatggacggcagttctacgacacagggattggcgctgtcctaagtgccctccatgcacggcagttctacgacacagggattggcgctgtcctaagtgccctccatggacggcagttctacgacacagggattggcgctgtcctaagtgccctccatggacggcagttctacgacacagggattggcgctgtcctaagtgccctccatggacggcagttctacgacacagggattggcgctgtcctaagtgccctccatgcacggcagttctacgacacagggattggcaggttacaactgagagtccaacgctggcccactgcctgttttttgtttttttgttgtgttttttgagacggagtcttgctgtgttgcccaggctggagtgcagtggtgtgatctcggctcactgcaacctccgcctcccaggttcaagcgattctcctgcctcagcctcccgagtagctgggattacaggcatgtgccaccacacctgctaattttttgtgtttttagtagagatggggtttcaccatgttggccaggctggtctcaaactcctgactttgtgacctgccttggcctcccaaagtgttgggattataggcgtgagccactgctcccggccactgcctgtttttgtaagtaaagatggatggcggtgcagctggcctcactgtgcagcgcctccttcctgggtagggacgtgtggtgggccttggggaataggaaccgtgggttatggatctaaggttgcttctcttaccaggctgaggagcttgactcttctgaaggtgatggggtgctctggcaggggctgagctgagggcaacccagtgatagtggctgccgagctcctctcaggcgccccctgcaccaagatggcctggtcaccatgggaggggacattgctccatcttacagatgaggaaagagcttcgggacaatggggatccctgctgggtcttccccacacagcctctgctccaggtgtgatgctttgtagatgcagccgctgcagaggtatggggccctgtttccccgcccaactcttggaacatccctgccaagcagggcttgtcctcagtgatgagtggaggaactcaagactccgagaagattcctttgaagttgttgtcatgtaacagcggctgaccccactgacagtgctcacagtgtgtgtctgggctgggtgggtcctgttgtgggcattgagtctggcagatgcccgggccatggggactgccgtgcctgttctcacgtcctcgattgaatcagcacttggcctgagctgttctcacacacgtggctcacacgatgggcaccagggttcttcccattctacagatgaagacactgaggcccttggaggctcatatggtacaaacaagacttgaacccaaggagccatgaacccagggagcccaactcttgtatccttggctctgtgttgctcaagtgagacgggcagagccagggctcgcggctgagcttccagtgtgacccattcttccttggacccaggcagagcctgcagcctgccatgctgcctgtggggagtcacagctgagtgtgggctctggaggctgcctttttcctgcctgtgtgtctttgctctgtgcctcagtttttgccttctgtgctgtatgtatagcattgcagtaggaggttgaaagtcttacaggatgcctggcccatggggtgagtgcccggtgtgtgttcctgctcccgggctgctgctacttgtccctgtagcataggagctgggtctcctggggtctgtgtggccccagtctggtggttggagctggctgggttggtgcttccagttctgtgggggcagcgtcatcatgggctggaagggcttgagtgagtaggtgggagagggtgtgtgggggcatctcccctccttccatgggcacagcggctcatgcttctgaggctctttcccatttcctgtcttacctattccttcccagcatcaggatggaggtgggatggggccactcacacttggtgtggaggctgcagaggaaggggaggccatatggcctaggttttgaacttgggagtcaggctggttggttaccggggcctggcatagctgatatctgacaggacggcgtcaagttacattggcagagcctgtggggtctcaggttgaatcatcccaccagcaggcacttgtctgtgagtccagagttcagtggatagggcaggatcgagggccagtaaattcagctgataagcccccactctggtatgtcagccctcgaagacactggatcctgcatcccacagtcagcccacagttcccagtgagatcagagcagctaatgctgcggatgctgttctgagacttcccgggcagccgcggctgctcatcgtgtcgtgccacccctgtgagggcagttgcacccctgcagtggcacctgcagttctgacagggcgtgaagggaagggactgagcttttttttttttttcctttgagatggagtctcactctgttgctcaggctggagtgcagtggagtgatctcggctcactgcaacctccgcctcctgggttcacgccattcttctgcctcagcctcctgagtagctgggactacaggtgcacgctaccacagcccgctaatttttgtgtttttagagagacggggtttcaccatgttggacaggatggtcttatctcttgaccttgtgatctgcccgccttggcctcccaaagtgctgagattacaggcgtgagcccccgcgcccggccgggactgagctttaatgggagccttgcctgggtggctgtcagagaaggggtggggtgtgttgtgactcaccagtaggtcccgagcccaggtgacctgccagcattccacagcagcaggtagcagatgtgggtgtgaactttgtgcctttggagcgttctggaggatgttctagtttgaggttcccctgaggctgggcagatttgggagacatggtgcgttctccccgaggagcctctgtgtgccactgcccaggaccctcactggtcagataaggctggggtggggtgggcacgtggcgacccctccctcgtcagatcaggcaggaagtgttctctttggcaattgaggagctcgccgtagactgtccaggttttgggagataacctggtactggaattgaagtcctcctcttctctacccataggggttgtgtccactgtggtccccgactctgcccacaagctgttcatcgggggcttacccaactacctgaacgatgaccaggtaacttccctgcctccctccagacccgtccccccaccccgccccacctcatcccagccctgatggactctcggctactgcaggtcaaagagctgctgacatcctttgggcccctcaaggccttcaacctggtcaaggacagtgccacggggctctccaagggctacgccttctgtgagtacgtggacatcaacgtcacggatcaggtgagtccccggtcgctggccgctgccgcgtctgtccttccctgccctgcgctgttgccaagccatggtctcccctcctcaggggacggggcgggaggcggccaacctgaggcagtgccctgtgtgtgggctcgtccctgtcccatggcgttggctttttccaggctcttaatcccctttgccttcccctcttcccccaccaatgccccggcttgggggtaggtgtcgggctcctggtccctgaccccacctctccccgcaccccccgacccctcatcctccaaacacaggccattgcggggctgaacggcatgcagctgggggataagaagctgctggtccagagggcgagtgtgggagccaagaatgccacgctggtgagccccccggcacgtcatcttccattggcttgagggaccctgggggtgggaggggctggctagtaggggacaagtgttcctgatctttctcccagctttcatgggaaggcatttggggggcattcagtgcagtgttggggagtcgggctttaggtgttggaagtggagagatggcctttcccctgggggggcatgtgaggggcctaggcttgagcagagggagactgggtctgggccccctgtgacgccgctgcctcccctggccccacagagcaccatcaatcagacgcctgtgaccctgcaagtgccgggcttgatgagctcccaggtgcagatgggcggccacccgactgaggtcctgtgcctcatgaacatggtgctgcctgaggagctgctggacgacgaggagtatgaggagatcgtggaggacgtgcgggacgagtgcagcaagtacgggcttgtcaagtccatcgagatcccccggcctgtggacggcgtcgaggtgcccggctgcggaaaggtcaggaggcctcgggctcagtgctctctcaccctctgcccctcctcttctccgcgccctctttcttcctctcttgctccctcaccctctccccctcctcttctccgcgcgctctttcttcctctctctctcctctcgcagcgcgtgcgtataggtgtatgccatcactgagtgccgccctcaggccgggccatgggagatgttggtgaccctgaggggtttgtggccctgtgggggcccaagacctgcaggcgagacagtagttggggaatgtagctctgtatcgctgtagaacttggccctgctcccccttatatggcctggcttgtgcaaatggttttgcctggtctgtggagtggggaagagtgccgggaacagtcccgagacacctgctggtgtctcctgtgtgccaggcaccctgccgaagctgtgtctgtgctcaccctgagccctccccgtagcccctgagccccatcgtggaaggagacaggcacagcgggggtggctcacactggcaggtttcaggttctcggagtctgatttcagactctgctaagtcctgtcacctccagcgccgtgacaggtgtaatcacctcacctctctgcctcatgagatggtggtggtgagggcgtgtgacctgctctttgatccccttgctgggtgtatgtatggaattcccatcgtaccaggctctgatctagacgctgagggttcagttgtgaatagaggtccctgctgtccgtgcaccctgctgtcccgtgcaccctgctgtcccgtgcaccctgctgtccgtgcaccctgctgtccgtgcaccctgctgtcccgtgcaccctgctgtccctgcaccctgctgtccgtgcagctgttagaggacctgcatgccgtattgagtcggggcaggggccgcattcctgggtgtactgttcgttcagggtggtcaaggtcaagaggtggcagtgagcaggtgagtgagcgaggtggtggggccagggctgagtggcaggccttggagggctgcctgggtcttggaacgaccgcttattttgagccagatgggagggaagcaatactgagaggcctccagggtggtcacgcctggcagatggaaatgaccccacatagtgaggttgggggtgggtgcggaggcacagcaggtacttcccctggccctggcttccctgctgagccctgcagggcaggatgtggatcagcaggagggcagagagggtgctgtggacaggagggcttgccgggagctggcagggttggtcttgccaaagcgatgccacagccaggtttgtcaggaccaaggctggctctgcagggccagatcgggcgtgggggccttcttatgtcatggaagcagctcggctttcccctggagttggtggccttttgaaggagaaaacaggactgtggtggtggcatttttgaggtgattgtggctgcagttgggaaaatgaatgaggtctcccgcaataatctggtgaaagatggtgatctgatttaaagtagtagcaggggatggagagaagttgatggatttgagggagacttgtgcctgggaagtgtccagactttggtgatgggtgtgggtttgtggggaggggaggagaaggcctatgagctgcttagtggcagctctgatggtggggatggcaggtgagatgcaggggtgatgagcaccttgtcgggggtgagcggggggtggggggcagctagctggctttgcggtttctgagacacccagtagagatgtcaaggaaaaattagctggacaggtctgtgttcccagcatgagggctgatggacactcaggtgtctgtcgaggccctgcttgggatgtcggagtggtttgcccagggagagcagggttggggagggcggctggagaggtggaaggagcatcttagaaaaggggcatggggaaggccaacggcatctcctctcactgcagctcctgcccactgccctccagagtccccttcccttgagctggtatgtcagggctgctcagggctgccctctggtgctgggatggagcttggctcaagcaggggctgaggaaacatttgtgggaagaaggaatggagagaccctggcctttggga[141 bp omitted]gaaaccccatctctactaaaaaatacaaaaattagccaggcatggtggcggtgcgtgcctgtaatcccagctactcaggagtctgaggcaggagaattacttgaacccgggaggcggaggttgcagtgagccaagattacgccactgcactccagcctgggtgacagagcaagacatggtctcagaaaaaaaaaaaaaaaattactgcattgtattgttttattcttaaattttttgttacatgtcttttcaaatatacttaaaagtagggactatgatagtgatacgtttttatcatagtatatgtgctaatattttggtgttccttcatctggcttcaagttaccaatattttgtcattcttaattttcatattcagcttatttctcccccctcctttttctttgctggattattttaaggcttatcaggtttatttcacctgagatccttaagtatatttctattatttctcaattaacattttgggtcagataacttctctgtgggggcctttgctgtgcgttgtaggatattgagatgtatccccagcctccacccaccggatgcaagagcactactccctgctgagacacccaaaagcatctccaaagattgctcagtgttccctggggacaccccccctcctccagttgacaaccactgctctaaccagataaccttaaaaaattgttttgtttttttaacaaaaccacaatagcatgattagatta[133 bp omitted]ttttgtatttttaatagagacagggtttcaccgtgttagccaggatggtctcgatctcctgactttgtgagccgcccgtcttggcctcccaaagtactgggattacaggcgtgagccaccgcgcccggccaataatttttttttttttgagacggagcctcactctgtcacccaggctggagtgcagtggcgcaatctcggctcactgcatccttcacctcccgagttaaagaagagtagctgggacaggcacccgccatcatgtctggctaatttttgtatttttggtagagatggggtttcgctatgttggccatgctggtcttgaactcctgacctcaggtgatccatctgcctcagcctcccaaagtactgggattacaggcgtgagccactgtgcccagccgaggatattttttatagtttgtttcagtaaggatccatatcaggtccctgccttgaatttggttacaaagtttgtgtaatttatcctttgtacctcactccctcttttttttttttgcaagctcttttatttgtagaagaaataagttcatctgctatatagaattttcagtgttcgtgtaggctcattgtatccttccctccctccattttcctgtaaattggtttaagcaaggttagaagctcgaatagatcaaggttcaagtttttaaattttattcaacctgggtttgaatcctaatttctgagcttcccttagttcacttattgttgggagaacatggctgttggggtggttctgggagcgcccaccatggtggctcgtgtggagtagacactcagcacgagggacccctcccccgcggtgagctcgtctaggcctcccgcctgcgctctatggctctgctgagtttctggcatgtctctattctttctccctctccatgcctatggtgtgtttatgctcttgttttttgatcctggagaatatttgggtgaactccaccaaacctgcttactaagggtccctttctgacacctgtggcgaagccccctcctccctgtcccttcctgccttcagtgctggggttgggtggacgctgactggctgttgggcgtgagccttgttcacaaacctgcctctcctttccccacagatctttgtggagttcacctctgtgtttgactgccagaaagccatgcagggcctgacgggccgcaagttcgccaacagagtggttgtcacaaaatactgtgaccccgactcttatcaccgccgggacttctggtagaggcggctgggggagggtgggggcagggctggctgggggcttctccccactcccgccccccccttatccccctctgaagacgatgggcagaggagtgacagccgcagacacacgacagccggcagcaactggaatggcagcaattaagggtggggggcgggggttggggggttggggggttagggcagggaggggactggggaagtgcgcacacagcccacacagacaacacgcacccacacagacacagagggaaggggttgggatggggacagggtgcacagcagggcggggtaggaccccagcccctcccaaaacagcctctccttctcccatagacccctttcttctccccttccccacggtaggaacatagcgtgtttatattttatggccaaactattttgaattttgttgtccggccctcagtgccctgccctctcccttaccaggaccacagctctgttccttcggcctctggtcctctctggtcccctcctgggtttcttacgtagttgatttttcctctttagtctcccccgacctgcgcccagccccgtggcccctgcccctctcctactctctgtggcagtttcatatttgctaagacgaatttgctcattaaacattttgttgtattttactttatggagcggctgtgtgtccagtatgtccgaccctcttcctcggttctgggctcgggtgggggttcccttggcaaactgcgggcccctggctgggacgcccctgctgccggcgccggcagcctcgaggccttccctgcttgcgcggtgcccttctcggggtcggcacaggcacagccccgggggacgtgaggttcccgagtgctctcccaccccgccgacaggagggatggtggccgagcgggccggggcgggcgtggcgtgggtgtgccaggagctccgcggttgccgccaagcgagctggagctgactctcggcgttccgtgagcaccgcgcggatcccccgctgcagcgggcggaagtgacgtagaggcgcctagcaacggggcccagcgcgccggaagtgatgccttccaggttggcttggctgcggaagcgactcctgccagggcggggtgcggcacgggagggcggggagcgcggcaatttccgcttccggtccgtcgcctccttctgttgcttcccgtctcctcggcggctcccctcccccgcccggctctccgcgccccttctgggcggcggggcggcggagccgtcggcgtgcggccctccttgcgttcgtgcgtgcgcccgtggcccggcgcacgtcccgcgacaccgaggccgagcggggcagggggctgaccgccatgaccccccagagcccggcgtgagggggccgaggtgagcgcggggcggagcgcgggggacgctggcccgcctgctccgggtgttcgggcctgggccgcggcgcgcgcgggctcgcgtctggccagttctgggtgtctctggcggcctttgtgtctctgctcctgtgtcggccttgactgcccccgtgtcggttgtctgtgtctgtctctctcgtgtctgtgtgtctgtcagcgtctgtttcctgtgggcctctgcctgtgcctgtttcagtgaacttagaaaagggtttggagataggagtgtgtttgtgtgtctgtcccgggtctctctctcctctgtctgtcgtgtctgtgtctgtcaggatttgttcgtgtctcgttgagtttccgagtcttcttttccctaggtgtctctagcccttccctgcgggcttttctgcctatggtgcaaatcttacccccgccccgtcttcgcatctgagttttgcccccatacctatcacctccaatcctgaagtttctttccaggagtctgttaacttgatctagaatctgccccttttccccagttttctgagtctctggtgtgatggtgaagagccccagccttggattcagaagcccggctgcctgctaagctgtgtaattgccaggtgatagtctctgtgtcaaaacctcagtttcctagtcgtaggaaatccatagttcgtaggcattcgtagttcctacatcatagggtccttgtgcatgtaagttgaggtgatgcttgtaaagtgcctgacggtatctgacacatagcaagtgtgtaattactgggagctctggtttttattattacagtgcttagagatttttacacagtaagtgttagatatcggtcggttattggagtactccttggagaactttgccatatcctttgtattctttttaatgtaagaattctctttgaatcaatttaatttgaaatacagtctcattctaagcagtatctgagaaatctcagctttgatgtgctagttgggtaattttttctaatgcacgccaaataagtacagagtattaagatagtgccttttctgccgccacccttttggaaatgttctctgttttttctctgataataatagcagccagtgttattgagcgcctactatctgtggggcacagagccaagcactgcatgtacccatcttatttaatcaacaggcctaccaggtaggaattctttcatttcagagttgagcaaactgtgtctcaaggaggtgtgcgctgcaggtagctgatgtggccaggatttgaacccacattttatattctttgccattagattccatttttcttatctcttatttctcagcgccaggtctctttttgtttctgggcctctttcttccttggcctcctgcctccctgtcttcccatgttcttgtatctgctgctgcctgtgtttttctcattgtgtctctgcctagctccctctgcccaggtttctatgtgtctctttctgtcagaactgtcttctatttcttctcagtccccttctctgcatttgttacatcatctcttcatcttaatgtattaggctggggctgttttgggactccagagagttactttttaactagctacatctgtcttcaggtgcctggctttctggcctgaggtggaagcagaggccagcctctctccgtcatccctatctcccctgggcttacatcatggcggggctttgaaaatctccctctgtggcttcttggagccgcatagatgggtgatcagagctggctctggaaccaggctgctccaggagtaaggtgtgtgtccctgggcaaggggctgaacctctgtgtctcagtttccaccctgtgaggtggctatgaatcatggggttgtttcaaggattaactgagttaatacatgtaaagcacttaaaacagtgcctggcatgggataagagcagtgcgagtgtctgctggtgtcatcatcatttgcttgactctcttgtttctcgtcaccagtctcgggatgggttaatttaatttaggttaatttaaaagtatgagttttggagttcaggtgggcctcgggttgagtctgccctgccattcctggtgtgtgaccttggttgaattatttaacttccaggagcccagtctttgcatgcagtgttgaaaaaggtaatgtccctcttgtgctgagcgagcacctggcacacagcagggacccaggcagtggggctgttaggttccttatctctcctgagccttgggcttccgctatccttgggacgtctggtcttctggcttccccggttcttcctgccgccctgggttggttccctgctcctgcctctgtctttaatcccttcatcagccttctttcccatgtgtccttgtttctgctgtggattcctgccccctctgcccttgttccagaggtctttcctgccctccctctccacttcctccttgcatggtttactgaatggtttttctgggccagcttctttgctgggaaaagccacatgcagacagacatgttctctgcccccatggggcctgtgggttgaccttagctacagaatcagacgagaatataaaatcatgagggagactgagtttactgatgaggccccagggataggtgactgtgatgtttgggtgtgcacctgggaagtgtaagcagagcccttggggtgagtggatatccctggatgaggaagaaggaagagcgcatgggcaggacggagggcctcctgatgcgctgccggtgtttacagggcgtcagttctctagatgaccgcatggagccccatttgacagaagagaaagctgaggtgcaaaagatccagcccgcccagggtggccttgccaggaagtgctgagccaggttgtggggctgcgatctgccactgcatatactctgcctcactgagcaggggccccagcaggaaggaggcagcctgtttgaggaactgaaacatggatggggttactttgagacctagaggttaacaagggacagagccttctgggccacagttaggaactcatctttgaccctgagggctctgggcaggccatgtcccatttgtgtttccagaggtcctcttcccctcgcagatgcggtgacctgccagcacctgccgcagccttcgtccgggagtcgccccatctctccacgcatcggggccctgtgccccttgctgctgcagccgggcaccatgtcgacctcgtccttgaggcgccagatgaagaacatcgtccacaactactcagaggcggagatcaaggttcgagaggccacgagcaatgacccctggggcccatccagctccctcatgtcagagattgccgacctcacctacaacgttgtcgccttctcggagatcatgagcatgatctggaagcggctcaatgaccatggcaagaactggcgtcacgtttacaaggtcagcatcctgctctcctccccgggcaggtgcaggggctcaggtgggaggacaggagcccgtgttgtgcaccctgcctgggatggcatcccggttctcaagaggaactggagaagagtaaaatctctctttttgtttaatgaaggcaacgaatataaggctaagaagtttggagccttgtggttaaaatctgtttttgagtgagtggtgcgtacgtaagattcatgtgctgaggaggcctgagagggcccacggtgcccatctcttctgtgtgcccagacacccagttcctttcctcacagcagccaagtttccgctctgggccccatctatgaatgcctctcaggcaggtgtgtgctccccgtggcacaggcgatgccacgctggggatgaacgctgtcgtgcctgtgagcaggactcagcgactgggttttcagtttgctgctcttggggtccaggggccttggcatccccacctttggtctttggttactgtgttcctcgtgttacggcaaagtggccaaggacatgggctggggccgggttatactcccagtggcgggatctcaggctcgtccctgaatctccctctgtgagggcccatggagccgattcacgtctgacttggggcaggggctggtgagtgttagactcctgctgttgcggtcccgtcggcaagcatctgcagaaggcccgctctgggtgtcttggtgcaccagaccaacaaggccccaccctcatgcgcttagacctgggcctgctctggcggaggtccctgtccttgctgatctttgagacttctgcctaggtgagggtggttccctccactcacagatgaggaggctgaggcctggagcgttgcagcacttacacatgggagcaggggttgaggctcgtttcctgtgactcgttttcatacccatcccgacacaccaggattgggttgagtcatagattgaatcagttattggtcatttattgtgaagggctgggtggcgtttgtttagttgagaatcttggaaaaccctggaggtgcaggtgagcctctctggaggcaacgaggagggatggggctggaggggtgggtgtgcagaggggatgaatccagaggggccccagacgcacatccttcctggtcagtggctggggtgatgctgctgggggcagacacagagtggcctgtgggcagggctggcaggtgccaaggcctgagagtctgctggggagcatgtggtgctggcagccagggtggacggcaggacagggcagtgcaggagaggggacgtggcctccagtgccaggcggggcttgggctgctttactgaggtgtaatttgcacacagtgaaacccagcctttcgagatagagttctctggattctgacagatgcacatatttcataactgtcatcacagtcaaggcatagaaggtttttgtcacccccaagacctcccctatggtttttgcagcccctctgggactctccccaggcctggctgttcctgctgtatccgccatccctgcagcatctcttgattcttgggactctcctttctatgatccccacagcagagcctgtaggatccccagcccatgtggctgaggacacggggttcccgctccaccctgaaccactggttcctcatgctggggtggggttcagcctcagttccccgggggagggttgatggcgtctggaaacctgctttggttgctgcttgtgctgcctgctggacactgtcctgagagcagctttgtgaggtcagcacgtgtcactgttgtccctgctgcggcatgcgccgatagctgagcataggcacagggcaggggtccaggagggggtccctgggtccacgtctagccagcgcctcccttcctggctgaccacttctatcccgcagtccccttctggaagtacgggtgatgaggacaaccccacaggcccagaggccctgagccactgtgaagctgctacaccccctttggccctctccggagccctctgtgctgacctgttctggcatgagggcgagtcctcttgcttctcaccatcccttcgccacatggtctcatcttgtcacttcagccccaggtggtgggttgtgcaggagcagtctttccactttgatggatggggaaactgaggcccagagacgggggaggtggcctgccgaggctcgtgggggagctggggcttgggcccatctgttcagagcccaggctgtcccaccctgtggccctgctggctggcactttgtgggccttattgtccccgtggagaaggagggtgagctgtgggggccttgcaggcctggctctgcacggcctccctgcatggccttgggggtgagtattggtgagtaagggccggcgtttatttggtaccttgtacgtgtagcacacacaggttctcatgaaatccacggttaccctgtaaaggaagttctttttctccttttcctctgttttccagatgagggaactgagacataaaggagctcagctctacctcgcaggaggtggtagagccaagaggagccccgagcccaccctctgggccctgcactgccacctcacttctgaggaatgcagggtctcagtcttggctttaaaccaggggtcagcaaagtacagcccactggtgaaatcccactcacagcctgtgtttgtaaataaagttttattggaacacagccaggcccattcatctgtggctgtgaagtagttgagacagagagtatatggcctgaaaaactgaaatgtttttcatctggctccttacagaaatgtttgctgatccctgttttaaactttatttctgcattgcaggatgtccttgataaagctgtctttaacattaagaaggactatcattttatgcagttgcccactgctttttggttgttttcagaaaagcaaaggagaaataatgacttattttgcaaactttttttttttttaacttttttagagacaaagtgttgctctgtagcccaggctggaatccagcagtacagtcatagctcactgagccttgacctcctgggctccaagcatggttgaggaatagctgggaccacaggcacacaccaccatgcccggctaattttaagatattttaaatttttttgtagagatggcagtctcactgtgttgcccaggctggtcttgaactcctgggctcaagcgatcctcttgccttggcttcccaaagggctgggattatagtcatgagccactacacctggcccacttgctcacttctaaaataaggttttaaatttttcattaagaagttgtatactaagcacatcatgaatgtataacacagctgttacgcatgtggacacctgtgtagccttcacctagagggaggtagaggatgcattcagccttccaggtttcctcaggagacctgtctcccacagcaccgtgtctgatttctgtctgccaagactgttcttgagctttatatatgtggagtcacacgcgtggtcttttgtgtctggcttcttttgctcaccatcaccatcaggtcagcaaggttgaccgtgctgttgcataaagcagttgttcatttattttgagaaagtctcactgttgcccaggctggagtgcgttgacatgttctcggctcactgtagcctctgcctcccgggcttaagcaatcctcctgccacagcctcccaagtagcagggatgacacgcatgtgccaccacgcctagctaattttttgttattttatttatttatttttttagagctggggttttgccatgtcacccacgatggtcttgaactcctggactcaagcgatccaccgactttagcctctcaaagcactggggttacaggattttgccactgcacccgattttatatatttatttaattattgtttcttatttatttatttatgagacggagtctcgctgtgttgcccaggctggagtgcagtggcaccacctcggctcactgcaacttctgcctcccaggttcaagcaattctcctgccttagcctcccgagtagctgggattacaggtacttgccaccacgcctggctaatttttgtatttttagtagagatggggtttcaccatattggccaggctggtctcgaacttctgacctcgtgatccgcccgccttggcctcccaaagtgctgggattacaggtgtgagccaccgcgcccagcctgttttttgttttttcttgaaatggagtttcgctcttgttgcccaagctggagtgcagtggtgctatcttggctcactgcaacctctgcctcccaagatcaagcgattctcctgcctcagcctcctgagtagctgggattacaggcgcatgccacaatgcctggctaattttttgtatttttagtagagatggtgtttcaccatgttggccaggctggtctcaaactcctgaccttgtgatctgcccgccttggcctctcaaaatggtaagattataggtgggagccaccatgcccggccttatttatttatttttaaatggagtctcactctgtctcccaggctggagtacagtggcgtgctcttggctcactatcacctctgcctccctgatccacgggatcctcccacctcagcctcctgagtagctgggattacaggtgtgcaccgccacacctggccagttgttttgtgtttttagtagaaacaggtttcatcatgttggccaggctggtctcgaacccctgacctcgggtggtccacctgcctcagcctcccatagtgccgggattataggcgtgagccaccacacctggcctcatttctcttttatttcagtgtatgtggtagtcccgctgtgtgagcgtgccatagttgatgtatgcatttcactgtgcgtgggtattcgcactatttcctgcttcacaatctttttagctgcgataccaaagtccagagagctctggaaacgaaagtgtttcatgatccgttcggcacaaagtctgacccagactgaagtgaggtcgttcacatggtgtctgttggtcccacagtagtgtggctgttggcacgactctgcccagcgcgttctcttatgtgttgtatgtgcgttattttcctggtctgaactcaggaaaattctgaattccaaaacacaagggccccaggagttgtggacctgggactgcctcttggcttggggtgtgatcaggcatagcaatggcttacctgctttcctttctttcgtgtaaataccttgagggccggttaaagactaatctctgattacactgtaaatactgttaacacacctttgaaaggccttgccagagctaggtccagctgcctcagagggtgaggagatatgaatggccctggcatctttcctggcagatttctccttggttcagacggagcttagctgtgatagctgactcttcccctaggagccctgggtgggtttctgtggctctgtgaaggccctggaatcccctgcagaatcaaagttgtgcctttttttgaggtcagtgaccaagacaccccctgcagagccttaagggggccatgactcctcaagcccaggacttgagcctgagctagggagagcctcagagaccttggtccccccgcccccactattaatttcaacttgttgaaagggagtttgttttcgtattataaaatacaaacataccaaagggtgcagattgaacgataatgttccctccgccctgtccttttgctcctggtggtgtggaacctgggtgcccctcccaagagagcccgggcctacacaggcccttgcgtggatctcttcccttcttgcagaggtgataaactactgctccaggctgttagtaccagcgtgaggttttacagtcagaaatacacatttcaaactagtactaagacccccttcattgtgatttaactaatgtggttttcttggccatgttactttagattttagttgtaaagaaatagacagggctccaggatgccaggcgatgcccatggcggctgtggtgcctgtagctgccatttcctcttttatttggattgagatggagctcctacactgtgcagcccccttcatatcgcacagttcagtggccttcggcccattcacagtgctgggcgaccacctctgtccagctccagaacgtcttcattgccccagaaggaaaacccatagccttcaggtggtccctctccatccctccctccacccctggcaacccacaatccactccgtctctctggatttgcccattctggatgattcacgtcgatggaaccgtaggctgtgtggcgttctgtgctggcgtctgtcgctgagcgcagtacctccgcggctggtccccgtcacagcgtgggtctgtgttcattcctttgcatggccgtgtcgtattctgtggggacagatgtgtgtccacccactggcgacaggtgggttgtgggccttgcgcccagtcggccgccccagagcccgcgtcgcaggcagtctctggcccgccttgtgcccggcgtgctgaccgggcatccccgtgcccgctcgcaggccatgacgctgatggagtacctcatcaagaccggctcggagcgcgtgtcgcagcagtgcaaggagaacatgtacgccgtgcagacgctgaaggacttccagtacgtggaccgcgacggcaaggaccagggcgtgaacgtgcgtgagaaagctaagcagctggtggccctgctgcgcgacgaggaccggctgcgggaagagcgggcgcacgcgctcaagaccaaggaaaagctggcacagaccgccacgggtgagtccctccctgcggcccctgacggcctagagtctgtcctccgcctactgcggctcccggcacccggccgcccactgctttctctcccagccaggagggaccgcggcatccccctttgcttctcctcacctgggccccttgctctggtctcacttgggccctttttttcccttagcacctcccatgcagcagctctgggacccttcctgcctcttgcctcgtgccccagggcaggcctagaattgggaacttttattccgctcccccataggctcagggcctgagggtgatcagtgctggggacagggctctgaggggacacgcacagtgacccccgagggtgctgtccttctctctgcgctgagatgaggggaacatcggagaggcagaggggggcctggaagaggcacagaaggaaggccagagccagggcctgcaggttgcaccaggcatctgggcctgtgttaggagccttgacagtgccttctggaggtggaggactcagtctggtgggtggtgaccagcaccgaaaacaaaacttgaaatagtgcatcccacatcgtcaagccaagatctgtcccacgaaacatttccagttatgtgatgggtgtgtgggtctcggactgttccaggaagtgtggtctgtgttggtcgggggctcacagccgtgaagaggctagtccggctgctcaggactgggagggaggctggagaatgtctgccaggctcttctgctctccaggaagagtggaggtgcctcagttagtggggatacgtgggatggggaggggctgctagagcactgccctggaggtggaggtgggtcagccaggccggtgcagacaggaggaagggcctgtggccctcgtggggtccggctcgagggactggacttgtttggggaagtctaggccttctgtttggacgggtctcatttgggatcacctttcagcacccacggggagacatgggtgtgacggggtgtgtgcgaccctgcctgggactccagagtagggacccacgagccagtagatgggcgtgaacgcagagagagagtgaagtggagggaaggaagccggtgtggcgtgggagtgctcagagccagggacaacaggagggagtgtaggcggcagagaggggctggtcagctcgaggcaggcaggcaggcaggtgggtggcggggttggggtggacggaggagggacattggcagtagctcggaggagagtgggagcctcaggtaagaggcctgagggtgggacatcctggctcgggggtcgtcagactttgtgcaaggccagagctaatgtcctctgcgttgctggccacgccttcccatcctagctgcctggccccgtccgctggcggttgctgggaagcagctgcacccctccgacactcaccaaggtctccgaaatttgaattttatgtagttttcacgtgtcttttttaagacttttaagttgttatttaattttttaagggtactctgaattttcgcccatcttggtgcattcttttcatttcttccaaccattgaaaaatgtaaaggcctttcttagaccttctcaggccagctgtggctgccactgtggtgtgctggcccctgtcttggagtgagttgtgtggagggctgtggctggggaggaggatgggggcagctagggagtgagccctgagaccctcagtgggcagggaagggcctgtggtccccgggcagcaccgaggctgggtgctctggtgatgggaaggcccgggtgttgctggctgggtgccagtattacctgtgatgtgggaggtggggccctcagggctgctgggcattggatttagccaccaccaggctggggggttaggggcatgtgcaaggtagaggttgggcaatggggtgtagattcccagcactcacctctgagagtccctagagcttaggaggaagtcacaggggcagggaagagcaggaggggccacaggggtgtggtcctccctgtgcgctggcctcacctgtgccccacgctgcccttccatctgcccatcccctcagaaggccgcttacccacccaagtccgtcaatccctgctggttctctcgtcctttcctcactcataaccccagatggtcacccttcggccccgctctgccacccacatgctccctggagcatcccatgcacccagccctgctgggcacaccacacgggggccagcctgggggcccctggacccggtgcaggtggggccgccagacagctgcctgctgcggctccgggcaaggggagccagggcctgctcgtcagggagaggcctgggcctggggagtgggttgggtggggacacaagtacaggacacaggtgcaaggcggcgtcttggagctggagcagacagaacttgctgaccagtgcacagtggttgggagggcggggcaggagaggcagggtccgccctggggctttggaggctggggcaatggccctgtgctcggcgggcctagggcctggttggagcctgtcctctgcactgtggaggggggcaagggtccacaggccttgggggtggagagaacagtgtcaggacagagtttgagggtaggcggggttgctgagaggatgctgcagtggaggccggggatatctcagcagcctcctggagggtccggccctgccttcctgtgtcctctctctcccttcccctcctgctcttggaaccaagggctcctcgctagcccactccctaaccccgactaggccttggatcccgctgtctcaatggatgctgttctcccctctgaattccagttgttccctgccagagctaccattctcaacaagccctggaaacaggcctgggaaacctgggaggaaggacctcccatcccccaggggcccagggacagaccccaggcacgcggagagtcctggtggtggcagggctcagaggttgctggggttccccacctgcttatcagactgacttttgctctggtccttccctgatgcctggcccctcccgtgggtggggctgcctgcatccccacccttcctcctctgagcacctggcgtctggtctccgcctctcagtcctagtcttggcctgcagaggttgtagggtgggggacttggggggtggggttggacacagaagcccccgtctgtctaggctatggggtttcctgtctctcgttccctggtctgggtctcacgcgtttctcacccgccctccagcctcatcagcagctgtgggctcaggcccccctcccgaggcggagcaggcgtggccgcagagcagcggggaggaggagctgcagctccagctggccctggccatgagcaaggaggaggccgaccaggtactgggcgtgcagctggggctgtctgtccgccacccgcctccacgcctcacttcaggctccctcccagccaggcgtgggcctggccctcactgtcgctgctccacatgctgtcactcgtctcctccccagtcctgcctcatcctcaccccgccgtccctctgcgtgtcactctctgcctgtccctcactggttcagggacccccagccctctctttcttcggctctatctgaccctggctctgcctctgactctgcctctggcccctcccgtcatgcccctcacactctctctcccccagcccccgtcctgcggccccgaggacgacgcccagctccagctggcccttagtttgagccgagaagagcatgataaggtcagagcagcctccctgtccctgcccctgccaggggctcccctcagaccagccccgtcgccccttcctaagtcaccccccaccatcctgctgggcccgaagcccacaggctcacgcgtgttgaaacctcagtaccttcagccgtaggatgtaggaccacaagtcagacagagcctgggtggtggccagcacagctgtgccaaggttgctcgggtgaccagggtcccttcctccccccaacgcaggagataccaccgaggcgggtgcccgtcctccccgggtgcgccagcacagcaccccactccccttatcccctgtcccgcctgacctttgacccaggtgccccatccccatttcatacattgtccgcatcccatcgaatccttcagccgctttcgttggggtgggaggggttgctggggcttccaggctgaggtggcatctgcccgtggctcacgttctcatgtctccctggtcgtgcccgtgccccaacaggaggagcggatccgtcgcggggatgacctgcggctgcagatggcaatcgaggagagcaagagggagactgggggcaaggaggaggtgagcggggcttgttctgccctccctggcccctgcaggtgtccgtccgtcccatcgctcattcctgcgtggccaggtccctggagcagagactgaaacacaaggtcctggagctgggcaccgggtttccaggcttggtcggcctctctgtgcctctccctccctgctgggctgaggccggtgactgaccaggctgccctgcggccacctcctgtggtcagcgctggccatcccccttcgggctgagcaccgtgagggccaccaccggccgccacagctgaatggggaggcccagaataggccaacagcctggcatggccacagggaggagggtgcagggctcgccccatctgtcacactttgtcgggcacctccttggtgccaggccgtgtgctgcacacccagggcctgttggtgagcgaggaggcatggtcccgccctcgcgaacactgtttctgtggcgtccccatgctctgcagctgagtagcaaaccctcccacaaccttgtgcttccaggtcacgcttcagtacttccctgtgacgggcccgctggctggttgtttcgtgtcatggctgaggtcactcatgcctctgggcccggggtgtccgcactggccttgccctccagcctcctcccctggcctctccctggttactagtctgtcctgagtgtcctcatagcacagtagctgctgctgctgccgccccccaggacaagctcgtcgggctgggttggagttgcctcgtcagcctgtgcactgctattggtctcagcaggtcctgaggccagcccaagtttgaggggtggggacaaggcctcctctccatgggaggcggcagacagcttgtggccataagtgatcaggcacagtgggactttcttggtagacggaaagcctctttaggttggcctcggccagggggtctctatcagtgtccaccacagcccagtgacccgagtaagggctgccctgctgggggagcaccagatctcacccatctcttctcctgccctgccctggactcagctcttctccccttcccatccccgccggggcctttgcctcacgggtgctgactggagatgtgtgcatgagtatgttgggggcatctgcacgttctgagacgggctctggttagctgggcccgtcgtgtgcccacttccagaacacaggaccatgcatgcgtgtgcgtgcggcatgggaagacctgcagtgcgatgactgcggggtgacagtggggcaatgggcgtgggaaggcctgcagcgcgatgactgcggggtgacggcggggcaacgtagggggcatcgtgaggggtgctcaggttgacctgagtgggttcatggggggcttcccaggggaaggcatggagcaggggctggccagtctggctggagaaggcacggtgggcagagggaggatcgagctgcttcgggtcgagcgaggggagggcttggcctccatcctcagtcagggccgggcaaggacctgggagcaggtggagttaaggggctgccctgctgcagtgtggagaatggatgtggggcaggagtggggctgtgttggggctccctggtggtaccctcgggtggggtaggtgggcaggggtgggccgaccccatgacggatgaggagggaggccaggtggtgtgtttggggcctgcctccctctcaccccttatggatggctgctgtctggacacccagggcctggccgcctcccccgccacgggccccagcttggtccctgtcccaggcttcccaccacttcttcatgctccttctcttctctctcccccacagtcgtccctcatggaccttgctgacgtcttcacggccccagctcctgccccgaccacagacccctgggggggcccagcacccatggctgctgccgtccccacggctgcccccacctcggacccctggggcggcccccctgtccctccagctgctgatccctggggaggtccagcccccacgccggcctctggggacccctggaggcctgctgcccctgcaggaccctcagttgacccttggggtgggaccccagcccctgcagctggggaggggcccacgcctgatccatggggaagttccgatggtgagtgcgtggcccacttgcatgcagcccctacgcctgtgtgcacctgtctttggttgactgtgcccttggacagggacagatcgagccagtggcgccgggcagtggtggggcgtcctgggtgcaggggagggggcaagggcgggggtcagatgagagcccagcacagggtgtgtgagattgtgccttggaggacatggggggtgtgctgtggggaggggatggcagctcagccgaggggcagagaggctctggccaaggcagagcgtgtgtgacgtaggcatctggggagggcggtgggtggagctgggaggtgcaggtggagaaggggcctgacacccagctggacaggggaggggtggccgagccgtgggagctgagggagggctgggcaggtctggcagaggctgcggggaagcccctcaccccagctggggtcccaggggcagagcctggcagagaagcccagttggaatttgagtgtgtgtgcgggaggccgggtggggtgggtttctggggggcaggggggcttttgtgtgaacagccacagatttggaggcaatggtcctccctagccatctgggcagtcaaggttgccagcccctcatgctcttctgtcctcacccaggtggggtcccggtcagtgggccctcagcctccgatccctggacaccggccccggccttctcagatccctggggagggtcacctgccaagcccagcaccaatggcacaacaggtactggaatgggggtgggaatggagccccgggtgggagtgagtgggagaagttagtgttgagtgtcctaagggaggggtggacgcctggactggaggtgggggctgaggcggggccccagggaggggctgagcagaacatcctgaccccacagcagccgggggattcgacacggagcccgacgagttctctgactttgaccgactccgcacggcactgccgacctccgggagcagcgcaggtgagcccctgccctcccctgcccagtggcgagagggagcctcccctagctcttcgggagccccgtcccttgctgtctttgtcccactccaggcagggccggctggacttagggatgaaaagttcagttgggtagagtgggccagaaccatccacctgtctttaaaagaagtgtgcatctttattttagagaaattgcagacttagagaaaaactgagaattgttctcaaggtttcccacccgaatgttgacctctgacccgtctctgcctccacgttgcttgagtgccttgcaaactctccaggtgtctcaaagaacacggactgtcttgtcctgtgcagtgagctgcgtggacaggggtttggaaggcagccgaggctccccttccgggtcgccactcacctgctggtggctcctgggctggccagggtgcgtcctcatgggtgctgcctttagctgccctggctccttggggttttcagctggcgtaagctggcgcccatcgccggtgacgggcccatctgctgagtcctgagtggctcttcgtcaggagtgcccgaggtcatagtgggccactggtgcttcgccgcggccctcagctgatacctgtctgtcccatgatgagtcaggtcagccttgatctcttatttttattttaagtgagctgttagtgaagagcaggttgtggtacagaaacctgtttccactgatgaaaggctggcagcttgcagggagtgagctgcacccacgcttccctcctctcattatctaggttaacgtagagcaaccttccagcatgcagttttccttcttttaggcccttttttgtcccatacaaatgtgtgcattttttcaacattaggtagaattcttaaatctatttaaaaggaaaatcaggccaggcgcaatggctcacgcctgtaatcccagcactttggaagctcgaggtgggtggatcacctgaggtcgggagttcaagaccagcctgaccaccatggccaaaactccgtctctactaaaaacacaaaattattacccaggcatggtggcgcacgcctgtaatcccagctacttgggaggctgaggcaggagaatcgcttgaacccaggaggtggaggttgcagtgagctgaggttgcgccattgcgctccaactggggaaacgagcgacactccgtctcagaaaaaaaaaaaaaaaaaaaaaaaacagaaaatcagacctctagccaacagatgtcttcacgctggcccggaacacgtgtctgtgctgtctgtccacttggaagctccctctggggctgtgtactcaaggagcgtctgagggcaggctcctctgagcctggaggcacctgtgaacacgcccccgctgccttcccccgcgggcctatagaccctggacggccccaccctgaagcagttgctgccctctggttgtcagagggtgacacctgcttctgtcatccctcttgtgtttgctcactggaatcagacccaccttatgggaatctgggctgacgtgaggttttggcctgggcaagcgatgcttccgctctgcacctcagttcctccttcccgaggcctctgggcaccgggctctttgaagcgccccctatgatggcctatactgctcccgggttggagcctcactgctgtctgccctgtctgagcccctctcccggatccttccaggagagctggagctgctggcaggagaggtgccggcccgaagccctggggcgtttgacatgagtggggtcaggggatctctggctgaggctgtgggcagccccccacctgcagccacaccaactcccacgccccccacccggaagacgccggagtcattcctggggcccaatgcagccctcgtcgacctggactcgctggtgagccggccgggccccacgccgcctggagccaaggcctccaaccccttcctgccaggcggtgagtgtgggcccatcacctgctcaagtccttcctgtgggttccaccagaggaggtgcctcacggggcagggacacttcgccctttgcctgcacatgctggatggacacaggtgggctgcgccactgactccactccgtgtctctggtttactcttcctgcaggaggcccagccactggcccttccgtcaccaaccccttccagcccgcgcctcccgcgacgctcaccctgaaccagctccgtctcagtcctgtgcctcccgtccctggagcgccacccacgtacatctctccccttggcgggggccctggcctgccccccatgatgcccccgggccccccggcccccaacactaatcccttcctcctataatccagggcggaagggggcctggctccatccggctgccccattccggctccctgggagatcagtgttgtgagtgcatgtgaaatgggggatccccacccccagtgcccttccccttcctggggcccactcacactacaccctcttcctttcccaccccacctccccggagagaaactggacatggggcctggggaggggagctggccagaggaggacccctttcccgtggcattagaagggggaggggtggctggggcccccacccattccccctccctccaaactcccaacccccagtcagtgtttgagcctcctcgttcccctcacgcacccgctcacgcaccctcggtgaatccttggtgatgattttggcaactttgggaataaatggcaattcccacgggcttggcactcccagattcccatctgtgatttcgtgtgtcccccagagccccttcatccagggacccagggctcaggtcacatctctttctcgggggtggctggcaaccagcccctctgtctcagaagccctgatttccctgaccctcccaggtcaagggatggctgggttgagggtggactgtgcgaggcctggcggagctgtagcccacacaggtccaggtggtcgggaggccactcatggccagacgcttccggtgcaggaggccttgctcttgtgttgaggggacaccaggatgaggtcagagagtgcactggggttcagggaggagaagaatcctgagagatggcacatgtgcaacacaggtcaccgtcgccatcgcccgggcccaccgcaagcatcactaatccatccctgcactcctggaaagccgggtcagcctctgccggctgagctgagtggaccaccaggcgcctcctggttgtcctctgtgtgctgttttcctctgtgtgctcttgtcctgggctggaccacacctggtgagactatccgggagaatcctcgggccgccttgtgaggggggtgttgctgtcatctccagggctaggtgacagcttgttgcaggccccacagccagggcctcagggatggggatctggccatgtctgttttaagccgaacaggctgttcttccatgtggagtctccctccgtgatcccctggggtcaagtcctgacggctgggttcgctccctcagtgactccgacagctcttgtctcagaggtgctggggtgaaggctgtgtggggccaggcccctggggtcagacttcttgccccttctgcccgggggacgctctgggctcagggtggggccagacagctacatcacagggacacttgttatgggtcggggtccagggagcacccagccagtggagtgttggaggccactgagagggacatgactgcggtgtccgagcagcgtcgtggccaccctgtgtgcccactccctggtggacagacctacgtcacctggggattgcagagcaaaaggagtgctgttggggtgatgtgaggttggggttctgtttcttgctgtgaattgggtcatgacctgtgtcggagcgttctctggcctccacttgcccctgcagaccagggtgtctggagggttgtcgggggcttgatggaggaattgctgaccacaccatgcaggaagaggtgggtcccagggacacaggaactttggggtcagccggttccagattcagttgcagaggagcatcccccttgcttagccagggaggggaagccctcttctcacacccggcctgggtatgttgtgggagagtcatttcccaggaggaaatggggactgttaccgggggagggggtgctgtccccaggcagcagcaagcgtcccttacgcttgggctgtccgagaccctgctgctctaggcggttgtgatgggggagccccacagggcacagagagccagctgaaggcggcagctctgggtgggatcacatggaaaggggaggcgagccgagcctccctcttgccaatcttggtctccccacagggtcatagctcctgggcccctcacttgtcagaccctccattcaccaaattaaggataagtttcacgatttcgcactgcggagcctgcactccctttctcttcaaaaaagctgaggacgaagataaaatgatacagttggattagtccagtggaggggttaaaggtgtgaggctttaattctccccaccatttcctcatttggcaaaacagagaagacaggattgaaaaacaagacaaaaacccagaggcttgcacataaatttggggcttaactacagcatcttcggcatcttcttttccctacagtgcgaattacaaagtagcaccacagatctcgtgtctcctactttattcctctttctagaatattccagccaccaaagtgctcagcaggagctgctgtgtaggagtcccccatgaggcccaagcacctgagcttagtgacatacacggttgaacgctgggagaatgctgggagcctgctgttgtccccgattgagggctccccccactgtgtgtgtatcactctttctacagcagatgtgtctctctccccacagtgggatggcgagcttgttaaatggccgtgaggaagactttattcaggaccatcgagacaggtacaggtaccatcagtggatggaaaatcactaagagcaaacctcaggggtccgggggttttcggctaaacccacctagcaggattcttgctgaaggcaggccagggtgatcagaggtcacctggggatggtggaggctgaagaagcctatcagatgtgagggtggcgggggttgggggggatggcggcggggttcatttgctgaaaggattttacaagggcatgcacggatgggcctaggaggaggttcagatccctcaggtttggctaagcaagagtcatggtggtgctcccggctggctctcaggagcagatgtgcttctgacccgacgtcttcccccagagagggctgaagtggaaaaaaccccagaatttctccctgggacaggtgaagcgatggggcgtgggacattcctgggtctcgactctgttcagggcctaggggttgggtggggaaggcacttgagggaaccttcctggagcccgtaggagcttcatccgagctcctgggtcaccccgcccaccagagtccaggcccaccagagtcccctgccacctgtgctcaccctagccttacccctcgctctactcccgccctcgccctatcctcgctcctcgccctacgcttgcccctcgctctggagctgcgatgccagcctcagggctttcagtcctgccttgatctttttttatactgaaactcaattttacacacacaaacccactcccagccagcctctgccttttgccttttcctcatgttctcattgaataggaagaaatgcccttttttttcccccctagaaggagtcttgctctgttgccaggctggagtgcagtggcacgatctcggctcaccgcaacctccacctcccgggttcaagcgattctcctgcctcagcctctcgagtagctgggattacaggtgcccaccaccacgc[178 bp omitted]gttctagggtacctatgcacaacgcgcaggtttgttacatatatatacatgtgccatgttggtgtgctgcacgcattaactcgtcatttacattaggtatatctcctaatgccttccctcccgcctcccccaggcccttagtttgtgctgctctgcgttggttttctgcgtgtgctaaaaggggagggagagtttctgtgcccattcccaggcaccttcttgcagccgcaggcatctcccccacacgtgcttctagcttcccgggtgtggcgtgagccattgcgtccggccagaaatgttttatttcttgagaacttgtctgtctctgtgatgactgtgggttgtccagctcatccctcaagcgccatcctgccaggcccttcactgtggtgagaaaccggcctactcacatcacaggtgcccctggagtttctcaaactgcagcccaaggattggctgcttgcttttgtaaaaaaaaatgttttattagagtgcagccacggctgcttctgcactacagtggcaatggtgacattgagtgtggcagagaccgagtgtcccttgagcctaaaatatttactatctggctcttcaacaaaaagtgtgctgacccccggtgattgcttgtatgtggcaggggtctaaggcctgcctgcacgtcctgggacagcccacgcttccacagggttccagcatgctttccgccgagaaatcgctccctttgctgtttgttttgtattgaatgtttcttcatgcttttgttttactttcagggataattatataatgttatgtttcatccacattattttagtatggatatttataatttcctaaagcactattttttttttttgagacagagtcttgctctgtcgcccaggctggagtgcagtggctcgatctctgctcactgcaagctccgcctcctgtgttcacgccattctcctgcctcagcctcccaagtagctgggactacagatgcccaccaccatgcccagctaatttttttgtatttttttagtagagacggggtttcactgtgttagccaggatggtcacgatctcctgacctcgtgatctgcccacctcggccttccaaagtgttgggattacaggcttgagccactgtgcccggcccataaagcactatttaatgactgctccataaatacaaacttcctttccttattattattatttattttttttttgagatggagtcttgctctcgtcccccaggctggagtgcagtggcgcgatctcggctcactgcaacctccgcctcccgggttcaagcgattctcctgacttgggactacaggtgcgtgcgaccacagccaactcatttttctgtttttag[153 bp omitted]aaaactatagacaatattatcataaccacccctgcaaatgcctcactcgtgttcagccatcatttacatttgaaccactcctgtttcacctacagcctcctcatggcccctcccctggagcacttaaaaatggtaatgacatgctctctagtaatcgttgtgtgttactgtcaaaaggtataactcatgcattgatgggggtaacccctacagcagttaaccctgcgtgctcagaggggaatgaaaggtagctcagaggctcgggaggtgaggttgcaaaatggcttgtgttgtggggaatgttctcatccacccaaatcaagcatcactacatccatccgcaggggaggcaagcttagggcatcacgtccaggagtggccaggtcccgatgtcacggggagccgggctgggacaagctccagacggccagggtggtgtgggtttgcagtgggagggctggcgcgggggccctgagggctccctggttcccatcttatcaagatgctggactcggtgcttgaaacatgtcctgacagccacatgaaaagggttagaaatgatactgtttcgcctgggtgctgtggctcatgcttgtaatcctagcactttgggaggccgaggcgggcggatcacgaggtcaggagttcgagaccagcctggccaacatggcgaaaccccgtctctactaaaaatacaaaaattagcctagtgtggtggcgggcacctgtaatcccagctacttaggaggctgaggcaggagaatcgcttgaacccaggaggcggaggttgtagtgagccgagattgcactactgcactccagcctgggtgacagagtgagaccctgtctccaaaaaaaaaaaaaaaatgatactgtttcctgtatttttttctcttagtatcttaagaaatacatgatttgaacaaggaccttgtgtctcctctcccctttcccggactattctgaccccagcagttctcagaaggagctgacattaatgagaacttctccctgttagacccttaaaatactgagctttcgggaccctgcctggcttgttcctgtaaaacggtcttgtctgtggtaaatactaaggtttttggtctcacagccgaggaaatcaaggatgtggatgcacacagagtgagatttggagcaggagtttaataggcaaaaggaagaaacagctctgtcacagagacgggtcccgaacgggttgtgaagttgtagaagaaatgtcaggggttttatagatgggctagtgaggaggggtgtcttttcttcctagggcctgaagaaccagttaggaccaggtgtgctgtctgcatcgagcagag[136 bp omitted]gtgcctcagcctcccgcgtagtcgggattacaggtgcatgcagccatgcccggctaattttgtatttttagtagagacaaggtttcaccatgttggtcaggctggtctccaactcctgacctcaagtgatccgcctgcctcggcctcccaaagtagtgggattgcaggcgtgagccaccgcgccgggcccccaccccattctttgatcctgcaggcaggcccttcgtttgtgctgctctgcgctgctgcttatctgtgtgtgctaaaaggggagggagtgtttctgtgcccattcccaggcaccttcgtgcagctgcaggcatctcccccacgcgcttccagcttcccttagtgtgcctaaagaaagggaaaggaatgtgctttaggcccactgttttcactggggcccatctatgtatgtggcttggtgattacccaggaacctcccaagtctgtgcccgagttgcttatctgtgttttacagcctgaaagatcaggctgctctttgttaggagaagtgatttctttgaactgcgtggtgtggtgagaaagggagcaatttctaagctgctttttgttaggaagttttttgctggggactctcttcgccctatctacctaaatgatttctgtttcttacatcaattgggtattgatttcaggtagaatgggtgaatgcatttattcgttcatctaagccgcatttactcctttcttttctttcactgttgttttttttttgagacggagtcttgcactgtcacccaggctggagtgcagtggtgcgatctcggctcactgcaagctccacctcccgggttcatgccattctcctgcctcagcctcccgagtagctgggactacaggcgcccaccaccacgcccggctaagctaattttttgtattgttagtagagacggggtttcaccgtgttagccaggatggtctcaatctgaccttgtgattccgcccacctcggcctcccaaagtgctgggattacagccgtgagccaccgcacctggcctctttcagttttgatagcagattatttcctttggccctgcgtggtctctctctggctgggcagctctgggccagccataaatggaggggagggcgtgtgtgtggccacgtgtgtttctgtcctggacaacactgtccggaggggcctaagtgggaagtgccctcaaccaaggagatagctgctgtgtgtgtgtgtgttgtgtgtggttgggacagtcggggattctcacttttttttaaaatttgagatggagtttcactgtcgtcacccaggctagagtgcaatggtgtgatttcggctcactgcaacctctgcctcccgggtttaagcgattctcctgcttc[135 bp omitted]ggccccccaaagtactgggattacaggcgtgagccactgggcgcagcctgggatcctcactttttcgcagattggtcactagcagggcgtctgatggaactttctgagatgccggaaatgttctctgtgctgtacaaaagggatgccactagccacatgccacgtagaacagttgaaatgtggccagcatgagatttttttaatcttgccaatttttgatggatttaagtttaagcacctgcgtgtgagcggctaccgcgtgggctgggattggaggaagctggaaagcgctcccctgcgtttcggctgctggcccagcagagggcgccggagagcggacggagccgcaggcggggttgtgggaagacgctgggatcccgtgcgcgcttgtgctccttccttctgggccagcgcgcagactatcaaccgaggtattcagtccctcggaaacccagttcctccgtttccaggcttctcgcccacacggagacagtcgctctcacacgtacctctcgcgggctcttactcgtggtcccggtctcctcctggtccccaccttccagcccagcgcgcacactagacggcacgtgctctccacgctctttctccagcgccccttgctcacccgccccccgttggagtggcccatcctctccgcttagacacctgcagtcactgtcactagctgaactgcgccctcctgaaagctctatgttgaaaccctaccccccaccctgcaccgaccccgtaccccagaatggggctgtatttggagacagggcctttacaaggtaagtaaggttaaaatgaggacattagggtgggtcctaatccaatctgactgttatatagtggggttgcaccttcatgtgaggacgccgggagaagacagccgtctgggagccaaggagagaggccttggcggaagccaaccctgcagcaccttcatcttgaatttctggtttccagaactgtgagaaaatccattgacgttctatagcgctcccagctggcggtactttgttatgacagccctaacatgaatgcagccatccacactgtctgggggaaggcacacacaccccacagcacccttgctgtctcaccccgtatcgcaaaagctcacgcatgtgtctctcccgagtccctggagggtcctgccacctacatctctctccttggcctgccgcctgtgatgctcctgggccccctgctccagcaccgctcccttccttctgtaatacagacaacagagacaggagatggcctggccccacttcatttctgttccctgggaaataagcatcgcaagtgatccgtagaatggtagacatcatccacttcccaagcatctctggctgaatgctgttctcatccacttcccaagcatctctggctgaatgctgttctacacatgcacgtgggaggcaccagggagcccagaagaaatgaaaagcctgggcagactcgcagttctgccacacagtgaatgtgctactcaagccactcagcctgggctgcagaggttggaagcctcactggcctgaggtttctgagtaagctctgacccaatcattgactattaaacttcagaggtccatggagacctcttaggagtctttgaaggaacttagcatagataccgatagctgctgactgcagggagatggggagatatgttttgtaaacctgtccaggcaacttttttgcctacggaaacacacaaaaacgaaaacaaaccaatgaaaaaaacctctcagaacgatacagaatccagagccactacaacacatttcatgaagtggcgtgagcctgtaattccagcagtttgggaggccggggcgaatggatgacttgaggtcaggagttcgagaccagcctggccaacatgacaaaatcaccatctctactaaaaatacaaaaattagtcatgcatagtggcatgcacctgtagtcccagctactcgggatgctgagatgggagaatcgtttgagcccgggaggtggaggttgcagtgagccgagatcgcaccattgcactccagcatggacaacagagcaagaccctttcttagaaaaaagaaaagtatccccgaacattatcagagtcaagttaataaaggccaaaggtagagaaaatcttgaaagtatcgagaaaatgacatgtcaatcataaggtcaggttcttcaacagtcatactgacattgtggctggaatatttgttgttgtgggatatatatatatatatatatttagagtgttgtgggatatatatatatatttagagacaaggtcttgctctatcactaaagctgcattgcagtgtgtgatcatagctcaccatgggattcttgattttcagtgagtataaagtgtaagacaaaataagtcttagttcaggtatgctggatgggaagccagaggtctgcatagcagttacaaagaaggccttattatctggaagaaaagggaccatagaatgtccattggttggggaacaacccagctttagtttttccagattctctgcatgtgcaggtttatgagactggagaactttgatttcttcttcctcctcctcctctcttttcttcttcctcttcctcctttttctcctcctttcttcctttatttttctttcttcctttcctcctctttcttctcctttttcctcctcttttcttcctttcttctctttttcttcttcttttttttttttttttaaaagaccgtgtttcgctctgtcacccaggctggaatgcagtggcgtactgttttagaaaagtgaaagagggccgggcgtggtggctcatgtctgaaatcctagcactttgggaggctgaggcgggtggatcacctgaggttgggagttcgagaccagcctggccgacatggcaaaaccctgtctctactaaaaatacaaaaattagccgggcatgatggcagatgcctgtaatctcagctcctcagtaggctaaggcgggagaatcgcttgaacccagaggcagaggctgcagtgagccaagattgcagcattgcaggaaagagagaaaaaggagggaaggggaaggaaaaggaaagaaagaaaagaggggaagggaagggagagatttaaaaaacaatagtaaagagagatttaaaaaacaatagtaaagagagattaaaaaaaaaaagtaaatgggccaggtgcgatggcttgtgcctgtaatcccagcagtttgagaggctgaagtgggaggatcacttgaagccaggagtaccagaccagcctgggaaacatagtgag[133 bp omitted]aaaaccccatctctactaaaaataccaaaacaaaaactagcagggcatggtggcgcatgcctgaaatcccagctactcaggtggctgagacaggagaatcacttgaacccaggagacggaggctgcagtgagccgagattgtgccactgcactccagcctgggcgagcaacagagtgaggctgtctctcaaaaaaaaaaaaaaaggaacggtagtgtgcacctgtggtcccagctacacaggaggctgaggcaggagcatcacttgaacccaggagttcaaggctgcagtgagctatgatggcaccactgccctccagactgagccaaaaagcagaccctgactctaaaacaaaagaaagaacaaataacaaatgaaaataaatacccaaaaaccagtcaaatgtgaaactggtgtcaggggtatgttctccatgttgagccccttctgtggaatatgacagtgtctctatttcgggtaaaggaaagaccaaaataactttccaagatgaaaagctaagagtgctgatctcatcacagacatagccagctcttcagttcagaccacctggaaaccctccccatgtcttttcagaacaatgtcctaagaaccataggggaagtggccataaaaaccatctttcctttgcagactggggtggggactctggccaatgccattctgttcttccataatatctttcccatcttgactgagcatcaaatgaggcccacacacaagattctcacccacatggccgtggcaaactccttggttcttctttccactggaatcccccacacaatggtgtcttttgtcctatggaaacccttgtccagtcttgagtgtaaactcgtgtttacaggtcttaaagtcctgacctggtgatccgcccgcgtggacctcccaaagtgctggaattacaggcgtgagccaccactcctggcctatgccagcattctttaaagttgtgggaaaaggccaaaagcaaatagaaaattgggcaaaaaagttcataattgcttaaacatatggaaaacctggaagtaaaattaagcaagtaagtgcgagcactctacattgaagattatagaaaattcagcctcccaaatatccaaagaatccaggagtgtgccaagagatccaagagtaggtccacaatttctcattctcaggagaatctgagattatatttcaatctaatgataactgattatataatccaatttctgcatcatcttgcttttatgttttgtaataaaaattttagaccaggccaataaggcatcagcaatttaccgtagggaactagggaatgtttaattatgacaatgaagtgtttaatattgtgttttgaaatataaacagtgtagatatatttgaataatactgaatttttagaaaaatctattggggtgtcatatataaaaggataagtagagatttggaaatgcttttttattggacaagaaaattgatcaaatcgaaatctggacaaactagaaagtctggatgctagcaatacaatctatagacacattctagcatcacttctgtgtcagaagtatccggattgtggtgcctacaaatgcatgctcctacacaccaagacatccattaagaaaataaagccatgctttccagagcgtttagcacttgtttaacgtacttgtgcttctaaatatcacaaggcaggatgggatttctaaagacaaggggatataggaccgaggcaaagacaatcagcatgtacactgaatcacactccataatcatattgctagaacacttagggagtacctctgaaatcacagccctgctgccatgatgtgcaattacaggatagaggtgccaggtgaaggtcccactgtggccaaggaaagcctttgtgagacgactacttcagggtgttccccatcagaggagcacacccctgatcttgtattcctcgtcaatccaaggtccatgtgaaatggtcagatggggaattttttcttccacagacatcaggatcttctgagtttcttcatcaaagccagatttgtgcagcctgggaaaatagaaataaagtttttttttttgtttttcatttttacacagtattgcctctctacattctgatgtctacctctcctctcctctttattctttcctagaaatcactgggagaattgtactgaatttgaaaaacaagcatgaatctttcctataggataggaagcctctgatttataccataaagtgaaatttcatatacaggatgtatcaattaagatttaattcaaaaaagatgaatttaagttaaaaagaaaaacacaggataacttccattcatctgatgttcatatgccctggcacatctattgcttcttataatgtgcttgcttaaaaaaaaaaaacatgagcttttctcagagacactaatataatgaattcatgtacccatcaccaacttctacaattaccaatattcagcctcttccatttacaacctgcccattttctaagaaataattaaagcacatgctacacccataaatatgtcaaacgttcttgtctgttttcgctattttcagttcctttcgtgtcattgtcccctgaacccacctcaacaaagctggtttttgtagtcaccaataacatcaatttgttaaatacattctatcctacttacccagttagcattgaatacagttaattacactttcttgtttattttttcccttagcttactggacacgacttcctcctggcttctactccctcaacagctatcgttcttgctttatacgttgaatctctgtctctttataacttctaaatgttctcagcatcaggaaaatataaaaaataagttcacaaataattggtaagactggaacataggccttcctgaaagaatataactaacatttgcaattctcttctcccctctcccgtgtccttccttcttgccaggtgttcatagttatatgcctttttatctccaattataaaaagaagttgaggaggattagcaggtcacaaaatttcgtagacatttagacacaggagaagtaggagtttatcttaaatcttcagaggtagggaagatggctaagtttcctttcagctacagcgacactatgagaaagttacccagaaataactgctctgaatgcttgctactgtggagatgacatgttttgggtgtggggatggtggttgaagagaagggagacattattattattattttataatgcaggccttaagtacctggcctgtccctatggggactgggtctctgtctcctctctgaattcatttttccctttctctgctatacagctccccgggactcccttctggccctgcagggtacaaggcctggccccatctcagggcctttatgttttgctgtgcccccttcacttggggtcctccctagacattcgtgatatggtttgaatctgtgtccccacccaaatctcatatttaattgtaatccccaatgttggaggtggggcctggtgggaggtgactggatcatgggggtggatccttcgtgaatggttgagcaccatccctttggtgctgttctcatgatagagttctcacgagatctggttgtttaaaagtgtgtggcatcccccctgcttcctttcctcctgctcccgccaccaaagacgtgcctatttctgcttcacattccgccatgattcaaagtttcctgtggctacctcagaagcagaagctgctatgcttcttgtacagcctgcagatgcataagccaattaaacctctttcctttataagttaccagtctctgccaggcatggtggctcacgcttgtaatcccagctctttgagaggctgaggcaggtggatcacctgaggtcaggagttcgagactagcctggccaacatggtgaaaccccgtctctactaaaaatagaaaaattagctgagcatggtggtgagtgcctgtaatcccagctacttgggaggctgaggcatgagaattccttgagcccgggaggcaggggttgaagtgagctgagactgtgccactgcactccagcctggatgacagagcaagactctgcctcaaaaaaacaaaacaaaacaaaacaaaaaaaaaaccttaaacaacatattgtgaacttttcttagagacactagcataatgaattcatgtactcatcaccaacttgaacaattatcaatattcagcctcttccatttataccccgcccatttgttttttaaaaaataaaaaaataacttttaaaaattaaaaaaataaaatcagaaggaaaaattaacataaaaaattcatcctacagatttcaaataggtacaactctaaaggcaaacctaattttcagaacaacgttaactgctgccatttggcgaatgtatttctgaatcaagaccttagcccattccagaagcccttctgaagtctgagctggcgttgcatatttatgggcaacgtaagtagaagatgttttatagagcagtggttctcacctggtgcaactgtgtctccgagggacttctgacaatttctggagctctttttgattgtcacaactgagggaagtgctactggcaactcatgagaaaggccgagaatgttgcttgacatcttacaatgtcaatggtttttatattttatagtgtcaacaggggcccaaggacaggcccccaccacaaacaaccctccagcctggcatccatcatgtcgcggttgagcaaatggccaatgaactaagctcgttctgaagtcactcaccccaaaggaaacagtgtccactcaccccagcatctgcagggcacagtccgggtggctcaatgcctcacacagcaccaccactgcatcagcatccaaggcaatccagtcgaggttcaggctcctcagtgttttgcaggcgatgagtgctgcggcgatgtcgtcgcagcaggcacgggtgatcggacacgtttgcagcctgcaaaagggaaacacaccagagaatccactctagctttgggtaggctggaaggcacgccattgttacttgctaattacacacctcccggcaggacgctctgctgtctagacccgggcttctcagccaggacgattgtgctcctgggggacgtatgtctagtgacctttatcccaactgaaggtgctgctggcaacttgaggatagtgtccaggggcgctgctaaagaccctatcatgcacaggatggcccccaaggcaaataactctccagtttcaaacagcaagagtaccaagactgagcaaaccctggggcagcattttacatatcagatcgtcccagagggacttgcttttaaacctgcctcccttccattctattgaccctccagcaattcctattcttgaaatagataaattttcctacgatggtgatcagtagatactcacccgagacactctaatttacagtgaggatgctgcaaagctgcacataactgtctgacaccagtgtctcctatttcattatgcccaagtttcagggtcttcagtttcccattgcaaataagaacagcagcaatgtccttacaggaatcggaagtaaggaaacagcccatcaacctggggaggtggaagacacacaaatacgtacacttatgaggtcaatcataacagcccaccttattttcatttattcatatgacgcaagaaatacccaagtaaatctgagatgatgaggagggtggggaggggaaggaggagagaagaatgagggaggagagaagagcagaggacgggagggtgggagaatgagggaggagggaagaaggggagaaagaggagggagaggagtgggaggggaagaagaggggaggaagaggagtgggaggggaaggagggggaggaggaggaggggggaggaggaggaggggggaggagatggaggaggggggaggagaagggggaggcggaaagggagggggaaggggaggaagagaggaggagggaagacaaagaaggtggaagcagcaatgacttcccagttcctccaccttccctactctgctccaacactttggggtccctgcacttcttctctcctgcctggctctcttttctctgtggcctctcctcattattctccctggttgaaatgctcctgccccaattatcagcatagctacctcctccccaccttcaaatccctgtgcaaatgtcacctttttggtgagccctcccctgactattttgtatatcatgtgtccaatccctctccaggccccaagctggtgattccttacagtacttattactccctaatacagatagacagaaaaatggtagatagaggacagaggataggggacagatgaatagttaatagatgataaatgacagatgacatatagatacatgatacacatagatgtgtggataggcacgtgtctacccacactcacacatatatatgtatgtgtctgatgtatgtacttgtgtgttggtggctctcaggcaggcaagatttttgcccaccagaggacactggtagtgtctggagacatttttggtctaccacgccaggagagaaagtgcccctggcaccttctctccctcctcccctcctcctcctctccctcctcccctctccctcttactcccctcctcctcctctcccctctccctccccacctctcccctctccctccccacctctcccctctccctccccctccccacctcttcccccctcctccccacctcttcccccctcctccccacctcttcccccctcctccccacctcttcccccctcctccccccttcccctcgtcccttacctctttcatcctctcttccgctcctgccccgacttccatcccctcttcccctctcctcccccatcctcccctctcctccctcgttcttctctgctcatctagtggctgagaaccagggaagctgctcaacaccctaggaagcatgggacagcagccccaacaacacagaatgaattgggctaaaatgcccccatgtcaatactgagaatctaggatgcagacacatccttgcagcctcacacatgcatgtgtgtgtatctgacactccatcagatggaagtccatgggaacagggatgttagaatgctctattgaccaacttatccacctagaagcatcttcagttcctagcagagggaatgaatgagtctcacgctctgactgtcatttatcaagagtgtatgacaagccaggcattgatcatagtccttcatgtgtgtgattccaactggccatctcgattctttaaggaggaggctctagctatcctctcattacctggggagaggtgagtcacctgcatgcattgatcatagtccttcatgtgtgtgattccaactggccatctcgattctttaaggaggctctagctatcctctcattacctggggagaggtgagtcacctgcacaagctcaggcagtcagggccactcgggactccatccaggcctttctagggctggagacccaactcctgagtcccctgctgtgtccttacaactccttcccactgaaggttcccagaaccaggtggggtaaatgtatagcctcatctggatttttttttttcagaagacaccattctcttcttgtctcagtctatttgggctggtataacaaaatgccatagactgaaacgggtcccttatagacaacagaaatgtatttctcacagttctggagccgggaagtccaagatcaagatgccaacaaattcagtgtctggcgagggccacgttctgctttggaagtggcattttctcacggcgtccacagatggtggaaggggcagaagagtctctggggcctcttttataggtgtgggagactccaccctcataacctcatcacctcccagaggatccacctcctagtaccatcagcctgggggtgaggacccaacatacgaattttgggaggacatatacattcagatgctagcatatccctttcctatgtctttcctagagccacagtatccaaaaaaagaaaccctgacattgaagcaaatcatggccggtcctaccacagctcccgtatgctgcagcctgggtgcttcagcgctgcacacagagatgccactccattatcttccagggcatttgagcccagatcgaggagggacagggacttactgcacaagaggacttcggaaatggagtcacaggagacagaggtgagacagcagtacatcaacctgcaaagaaacacaccgtctcccagcctgctgaacagcagtacatcattctgcagagaaacacaccatctcccagcccactgaagcttcctatggtaatattaccatattttctttgtcccaggcaaaacctttccagatgttccttgaactctgctgtcactcaagaaaataaggagctgggtgcggtgcctcacgcctgtcatcccagcactttgggaggctgaggcgggcggatcacctgagataaggagtttgagaccagcatgacccacatggtgaactcctgtctctactaaaaatacaaaattagccaggcatggtgacgcacacctgtaatcccagctactcgggaggctgaggcaggagaatcgcttgaacccaggaggcggaggttgctgtgagctgagatcgtgccactgcacttcagcctgggcaacaagagcgaaactccgtctcaaaaaaaagaaaaggggattaaaacttgtaacacctacagatgtacagaaagatgaatgtggaatacagtgtcccaacaaacaatctcagattccagttccaagtcacatcatcaccagctggaagacctagggcaaaagtcacccattctttgcaacagagtatacatatggcttaacggaatgtactggacgatatcccatgtagaataatttttgttttgttgtttaatacacatatttaaggttttgttaaaagaatagattttaagtgctctagtcacaaaaaaataaaatgcttcaatgatgtcagatgatgagtatgttagtttccttgacgacagtcaacattttactatggatatgtatgtcaaatactttttgttttaaaaattatttaatcacaatgtaccgtatacttcgctgagagttgattttaaatgttctcacatcctccaaaatgataactctgttaattagcttgattatagtaatcattttacagtgtatgcatatatcagaacatcacactgtatggcttaaatatatgcaatttttaaatttaaaaattttctttttttttttttttttttgagatggaatcttgctctgtctcccaggctggagtgcagtggcacaatctcggctcactgcaacctccacctcctgggttcaagggattctcctgcctcagcctcccgagtagctgggagtatgggcatgcgccaccacacccagctaatttttgtatttttagtacagatggagtttccccatgttggccaggctggtctcaaactcctgagctcaggtgatcctcccgcctcagcttctcaaagtgctgggattacaggcatgagccaccacgcccagccagctccattttactgatgagcaactgaggcgtgggaaaggaactcaggtctagctacggattccgcattctgctgcacccctcagtgagcaccgcgttgctttgataatgggtggatccaggtgcacgcttcagaaatctccgaacgtgcttcccgcagaccaacttacatcagcctctccagggcacagtgtgagtgcttcagggcttcacacagcaacgtcattccttcgtccctcaagggattttctaccaaggagaggtgtttcagcttgctgttgcaggccaggacggaggcgatgtcttcacaaacttcactggagatgtcacactttcccagtctacatgtgaaacacacaccatgagacggaccaaagctttcaatcgctcatgaaacattatccacagaccaaacgacacctctgattctagtcttgcacctgccgatccattatctacactacagactctttttcttttttttttttttttttgagaaggaatctcactctgttgcccaggcaggagtgcagtggtgcgatctcggctcaccgcaacctccacctcccgggttcaaatgattctcctgcctcagtctcccaagtagctgggattacaggcgcccgccatcacgcccagttcatttgtatttttagtagagatgggggtttcaccatgttggccaggctggtctcgaactcctgacctcaagagatctgcccacctcggcctcccaaagtgctgggattacatggatgagccaccgcgcccggccacattacaaacttttaagaagtgcaaacgtaatgacatgactccctcattaatcccgtaggtttgcactgaagttaggaaaaatgtcaaagcccacgcttctcaccacctggggtgatttgccctaatggagacatgtggaaatgtctgcatatattattggctgtcacgatggaggcagccaggaatgctgctcaacgtcctttagtgaacaggacagaccctgccacaaagaagtatccagaactcgataaatctgactctctgtcaatagcactacaagaaataggaaaacccaaactgtgttttttttcctactttcacacactcagcgcaacacgcttctgtggccggagacgggagggcagctcttttgcagccactaagtaggtgtcctaaaacttaacccaatcctgacacttcccagaggagctagacacagagttgatcgattatgcctgtgtgatgaaacctccataaaaatcctacaagaatgtggttcagagagcgtccaggttggcaaacacatccacacgccacgccccagctccacagggacagatgctcctgcactcgtgtggggaaaagaatgagagatcagattgttactgtgtctgtgtagaaaaggaagacataagaaactccactttgatctgtactaagaaaaactgttctgttttgagatgctgataatccataactttagcctcaaccctgtgctcacagaaacacgtggtttaatggatttagggctgtgcagcatgtgccttgttaaccatatgtttgcaggcagtatacttggtaaaagtcatggccatcctccagtctcgattaaccagggacacaatgcactgcggaaagccgcagggacctctgcccgagaaagcctgggtattgtccaaggtttcccccactgagacagcctgagatatggcctcatgggaaaggaaagactttaccatcccccaacccgacacccgtaaagggtctgtgctgaggaggaggagtgaaagagggaggcctctttgcagttgagataagaggaaggcttctgtctcctgctggtccctgggaatggaatgtctaggtgtaaagctgaccattcccattcattccattctgagataggagaaaattgccctgtggctggaggcgagatatgctggcagcaatactgctctgtgactctttgctacactgagatgtttggatgaagagaaacataaatctagcctacgtgcacatacgggcacagtacctttccttgaacttattcatgatacagattccttcgctcacatgtttctctgctgaccctctccccacctgttgcccagccacattcccctcgccaagatagtaaaaatagtgatcaataaatactgagggaactcagagaccagcgccagtgcgggtcctcgcacgttaagcgtctgtcccctgggcccactgttctttctctatactttgtctctgtgtcttgtttcttttctgagtctctcatctccacctgactagaaatacccacaggtgtggaggggctggcccccttcacactcaggacccttccagatctcatcctgtgtgtctatctggctgcacatctgtatttttcagatcatttattaaattgagagtcagatcccagctgcacatctgtatctttcagatcatttattaaattaggtgagagtcagatcccacacggtaggagctcagtcccacaagatcacccttgacttcagatgccagttgcaagcgctgggttgctctgcctgtgtttgaccaaccggctatacatgggggttcccctgaccccttccttgggttagactgatttgctagagtggatcacagacctcaggaaaacaattacatttcataaatgattgcttgagctcaggaggcagaggctgcagtgagctgagatcccacctc[134 bp omitted]cggcctcccagagtgctgggatgacaggtgtgatccgccatgcccggcccggcccctggccaccttcagatctgtcttctccatcccgctcaaagggcaatgcatatgcaagtgtttatgcatggattgtttgctctccattgtgataattttttaaaagctcctcagtcttttgactttttattaattattgcatgcctgtatctaattatcttctgtgccgcatagaaagctcctcattcttcaagcctctcgattgaaactatgatggggatctctcctgtcagaccaagaggaaatgggagagaagatgtagcagaagccatatttaaagatagagatcatggtaaaatgttctcagaagcctgtgcaaatgttcatccacaaatgcaggaagctcagtgaatttttaagcaggataaacacaaagaaataccaaaaccacacacaatgggggtgggaggggaaacttaaaattagccagagacaagacacattaagcacattgcctacaatgggacgaaatatactgatttatttagaaaaagcatggcagcctgaatgggatggaattacatctttaacatgtaaaagaacaaaagaaagaaaacagtgaaagaaaacctacaattctctgatgtgtgggggaaaaaaatctacaaaaataaaatcaaaacagatatttttggtctcaaatacaccgtggtcatctggtttataatgataactactgttgttcacttgagaaaaagtggtttttcaacagcattctgtgttcatatgtgaattttttttaaacctgactttatactacatagaaacacttactcaaagtaggtcatagccccacttgtgcatggtacaataagactttgagagaaaaatgcacaggaagttattcttatgactttgggcttggaaacaattattttcttttgagacgtggtctcaccctgtcactcaggttacagtgcagtgacgtgatgacagctcactgcagcaaccttggacctttgggctcaagagatcctcctgcatcagcctgatgagtaagccgtgactacaggcatccaccaccatacctagataatttttttgttttgtttttagagacgggagtctcactatgttgcccaggctggtctccaactcctggcctcaaacaatcctcctgcctcagcctcccaaactgctgggatcacaggcatgagccaccaagcctggcaatgattccctaaacacacacaaaaagcagctgaacacgaaaagacacattcagttttgataaagaatctctcttaattcaaagatgatattaagaatgtggaaaaccaaaccacatagaagatatttgcaatgcatgtatttgacctaggattcattccgcaatataagaaaaacacctgtcaatcaattagaaaaagacagcccaataaaacaatgggctacatcagcacatcaaacagacatatcacaacaggaagcccagaaagtcaaacaaatgaaaaggcgctcatattattagtcattagagaaatgcaaattaaaaccactcagatattatgcccgaagcagaatggatttgaaaagatcaacacccttaagtgttggggagaaaacgggacaagtggaacacattcatttcataggcaaataatctggtgaagcctctggttaaaagatactgattaagtctagtttcactggaagtttcataaaagcatatttttaaaaacagctttgtacatttcattagtaaagtttcctagttttaagaatgcactattgttatgtaagatgttacctttggtggaagttgggtggtgattggtatatgggacttctctgtactattattgtaatttcctgtgagtataataatctttcaataaaaagtaaacaacaatgacaaagtaaaatggctgatgtggagaaacaggtgtttgtcataagggtttccagatacacacgaattaaggtgtggtatccataaaaatgtttgtccagggccactgcacagtattagatgtttttttcctagtacaagagcccctgggttggatttaggcaaataccccattctgttttagccaagctgaccccctcccaccaccagaagagaagcatcactctaatctctcctagggcacttcacaggctagcactcagtagtccagtactagataatcctttgttgttggggagctgtcctgtacattactgggtatttagcagcatccttggtgatatggtttggctctgtgtccccacccaaatctcatcctgtagctcccataattcccatgtgttgtgggagggacccagtggaagataattaaatcacaggggcgggtctttcccaggctgttctcctgacagtgaatatgtttcacaaggtctgatggttttataaaggggagtttccctgcacaagctcttttctcttgtctgccgccatgtgagatgtgcctttcaccttccaccatgattgtgaggcctcccaagccacatcgaactgcaagtccaataaacctctttcttttgtaaattgcccagtgttgggtatgtctatcagcagtgtgaaaacggactgatacacttggtctctatccaccagatgccagcagcaccctccccactcaactgtgatcattgaaaatgtctctaaacattgacatccccaaagggacaaaattcccccattgagaactactgagctagagagaacctgactttgaagaccttccaccaccaataccacactgaagtaaatgaatagttagtttaccccaaaaggcaacattcccagctacattatgtctatcattgtagatatgttccccaatccttatgttaatgtataatagataaaaccctatgcaaataacataattatgaaatggagcaaaatactatagaattttgaaagttccccctgagaagagaaagttagagtagaagttaaaaaaaaagttgccatgatatggaaacagcttgaataaggaatgagatctacagcagttctataagctcaaacaacccttatgcatagaacctgcctctttctcctgatgggtctagacgcataaaattaaccaagtatagatgaatctgtcaattacatttttgacggttactgcaaagacaagacagtgaactgggagagagaagagcatattctcttagggggtttagtgggctgattttatttattgctgcctcaatgacttcctttgttctctttggaaagatggattggccagtgattattctactataaagatacatgcacatgtatgtttactgcggcactgttcacaatagcacagccttggaaccaacccaaacgcccatcaatgatagactggataaagaaaatatggtacatgtacaccatggaatactatgcagccataaaaaaggaagagttcatgttctttgcagggacatggatgaaaccggaaaccatcattctcagcaaagtaacacaagaagagaaaaccaaacactgcctgttctcactcataagtggagttgatcagtgagaacacatggacacagggaggggaacaacacacactggggcctgtcggtgggtggggagctgggggagggaaagcattaggagatatacctaatgtaaatgacgagttgatgggtacagcaaaccaacatggcacatgtatacctatgtaacaaatctgcacgttgtacacatgtactccagaacttaaagtataataataataataatagaaaaagaaagatagattggctctgcctggaaatcacccagttaggacaggggctgctctgacaatgttcaagaggaagaaattactttgggcaagtcattctccccctggctttaatgctgtcaactgccaaatcagacgatcacacttgtgatcattaacatgcttcagtttcaagtttctataaatatctttagggaaaaaaaaatgttgttcttgttttggcctggttgcctgagggcagaaccaggaagtatcaagggaggtgtccgtgagatgagcctggatgcagtggctcatgtgaagtactgtaatcccagtactttaggaggtcaaggcgggcagattggttgagaccacgagtgcaagatcagccggggcaatatggtgaaaccccatctctacaaaaaattacaaaaattagctgggtatggtggcgtgcacctgtaatcctagctacttgagaggctgaggtgggaggattgcttgaacccgggaagctgaggttgcagtgagtcaagattgcgtcattgcactccagcctgggcaacagagtgagaccctgtctcaaaaaaaaaaaaaaaaaaaaaagaagtaattaaagtgagtactagagatgggaaggcggaaacaaaccttctgagaggaggccttgcccggcagaatctaccttcaccttatgagagagacagattcaaaagatgaaaaacaagagagatgaaggctgatgcaatgaccctccaggaaggaaaacaagaaaatcaaactgcaaagcccaccttggaaagaaacagcactcggcatgaacagcccggacttacatcagctcttctatcttgcacattggatgtttcagcgtctcacacaggtgtctgatgtcagactgggagaggctagtgccgtacaggctcagaagtttcagatgagggttgtgaagaactgccttaaataattctgaatcatgtccaaagtacacagaagtaaatctgcaaaagattaaaaaaaaaatagcatcatgcaatgagatcccagcacaaagacagacacctcttgtacgattcttcctgccctgaatgctgggcctcaccacactgtttctggaattctggttactcctgccagtaaattatttctcgatggggtttttagacaccagacagcacagaggctcaagctgcttagaactttcctgtttcttcctagcccctccacttctacataactccaaacatagaaggagaacgagtcagccgaatcccatgttaaaccgagccccatggggacaggaacaaactatacttgtacctctttgtattctgagattaatgtgattaatgcctcacataaaatgacgcacacatatctgaattaatgctccaagcaaaactgtgttacccaaggaaataacccatttctgttttaaaattaagatttttttttttttaataaaagagacaatgttatgtagtgtcaaaaaactcaggctccagagttacaggaaactggatttcacattttgcttttctccttgttgcttttgcaagattgggcaaatgacctaatggctgtgtggcccagtctcttcatgaaagatatggtcatggtaattaagaaattaacatttaaggccaggcatggtgactcacacctgtaatttgggaggccaaggc[131 bp omitted]gaggtaggaaaatcacttgaacccaggaggcggaggctgcagtgagccgagatggtgccactgcactccagcctgggcaacaagagtgaaactgtgtctcaaaaaaaagaaatgagcatttattgtaatgcctggaacatggtcaattcatgctggcttttattttaatatctacatgtatatgccatatatgtgtatttataaaccaaatacgtaactacaaatatgtgtctataagccagatatgtacatatttaccagataaatacaaaaccagaatatgtacttaaaatccagacaaaatttatgtataaaccatatataatatgtatttattagcctgataaatgtgtatttacaaaccagacacacgtaagaataaatacatgacacacagaacttgctctatgtgactcctggcgttacagcagatgagcgcaccctgatttctctcctagtcaactttaagaaatgacagagaattttaaaagtaaatacttttaccatgttcaaaaactagaatggaaattttgagtaggccagaatcaaaacacagataagggcagatcacagaggggaacagcaggctggaggaactgtgcggactgcgggcggagtgatcccctaaatgtctgagtgacacccaggtaccacctgcccggagataaaggaagccaggagctggtgacagggcggtgaggtgtacagggatctgtgcggcgagggtgagcagagcctgacccactaacaggtggaagtgctaccacatgaaaacagggaacccaggccgggcgcggtggctcccgcctgtaatctcagcactttgggaggctgaggtgggtggattgcttgagctcaggagttcaagaccaccctgggcaacatgatgaaaccccatctctactaaaatacaaaaattagctgggcgtggtggcgggcacctgtagtcccagctactggggaggctgaggcaggagaattgcttgaacccaggaggtggaggttgcagtgagccgagattgcaccattgcactccagcctaggggacagagcgagactgtctcagaaaaaaaaaaagaaaaacagcaaacccccttgatttctggagacacctgtgagaataagcgggaggtggtggcaaaaaggacaggaatatccggcctccaagccaccacaccacattcatgaaagcaccgggattggttagctaggcagctgcagtgaatgccaaccgtcagccagcagcaaacaatcgagtcaacagacaatatggtgggaaaacagtcacaaagatgaacatgtaatcaggaatcatcgccatttcaggataatcaacctcatggaaaaggggcaaactaaaatagaagagttgattatgataccatttgttgactatttgccttgtcaactttttcctttttctacacataaaatgataaaaaatgcaattgctgagatgaataaagaagcagaagcctgggctcattccttcaactttgagtccaatgcctccccagcgttagggattaaggaccgctggaggtatgtgtgtttggaacatattgatccatctgttattagtctgccctacaacccaaggaatcaatctacttctctcagcctctactgatgccactctgtttccagaaactattatcactttttctcaagtataacttcttccttaactatgagggaaaaaaagttgataaatagaacaggatctgaactaaccattccatgtgagtgatggcagttgaatgatacctccaatgttccctaaaccctaaccttggggaggcattagaatcgatgttgaaggaatgagctctggcttctgattctccatcgtctcagcaattgcatttatcattcatatacacaacagaaaagagaaggaaaaacatttttcaatttcaaggcatgtggctagatacctttgaagagaaatgaccaaactgtctctatcatttctggacaacttaaaatgaatctaatgatgtttttactagacactgaactaaaggacttgtgtaaaatatcaatgagttgggaggtcaaggcaggtggatcacatgaggtcaggagtttgagaccagcccggccaacatagtgaaaccccatctctactaaaaatacaaaattagccaggtgtggtggggggcacctgtaatctcagctacttgggaggctgaggcaggagcattgcttgaacctgggaggcggaggttgcagtgagctgagattgtgccattgcactccagcctgggcggcagagactccatctcaaaaaaagtttttttaaataaaagatcaattatttattctgtcatcaacactgtgaagaagcactaatgtcctcattttgtaacctaaggttcctaggaaggacacgtgcatcttaattcacgccttcacccaggtttatccagattactgttctgcttcatgttaccattgacctcatgtgaaaatcaatgacttcttgtgctttgagactgaatttataaaacaaaaatcaatgacaaatgtcttcattgcaagaccactaaccacctcttccttgctagtatccctcacatatcccattgaaattcagatactgcttatgcgttataatcaagccagtcccctactttaacattttccagaaaaaaaacagttcagtgaggtccactttttactctccatgtgggatctttagaaattcttttgagtcagttccttcattattttcagcacacattcattctatggatgtttagtgagcccctacaaggctttgtatttttctagatgctgaggatgtgagggtaaacgcatccccatccatcatggaggtttagtcaacagagaaacactgtgctccccaagatcactcctagctttggtgacttgctaggagaccttgtacgacttgcaatacagtcttacaatggctatgatttatttcagcaaaagcacacaaaggaaaaaccaccaaggggaaaaggaacataggaaaaatccagagaaaaccagacagaagcttccaagagtcctctccccgtgggatcaccaggacacaataaattcctctagcaacaaaatgtgagaacacatgtgaagtgtcatctaccagggaagctcattaaggattcaatgtccgtggtttttactggggcttgtcatataggcaccctctgcctagcatgaaccaaaattcaaaactcactgaaggaaaccagacattcagtataaaccacagtgccggtagaatttacgaacagtgaaccattcttatcagtcaggttggtggaaactctcc[134 bp omitted]cccgtctctactaatacaaaaactagccaggcgtcgtggtgcatgcctgtaatcccagttactcgggagactgaggcaggagaatcgcttgaacccgggaggtggaggttgcggtgagccgagatcattccactgcactccagcctgggcaacaagagcgaaactccgtctcaaagcaacaacaacaacaaaacaaaaacaaacaaacaaaaaagacatcagccaaggaccaacttagcaaacaggcctttctcgagacagcagtcttaacgtctgctatgttaacttttttctgcacaaatatgtgggccaataattcaacgcaataactcttaccaaaaagatgtataaggtgctttgggagcatagcaagtcttccgtgatgacatgacttttcaagctgaaggaagacttaaatttaacctgaaagcagtaagtttgcttacaggggtgaagagaacagcatggcccaggcaaatcaagataagtaaaatatcagggaacaactgtgtttctatcctctcatacattatttgtataaaagtaataataaaaactttattaggattaaaagaaacggaagaaaatattgcacatcagcactctgttttatgaatgctaccattatgcttatcttatttttctttttctttttttttttttttttttttttacaaatttaaggctatttttctgtctgtcctcagcactcttcctttctcacctgagaaacatctattctccatccactcacatccaagcaaaggtcatccctaaccaggactgctcgctctctggccctccaactagatttcattttacatgtcactacatttttttttttttttattatactttaagttctagggtgcatgtgtacaacgtgcaggtttgttacttatgtatacatgtgccatgttggtgtgctgcacccattaactcgtcatttacattaggtatatctcctaatgctatcccttccctctccccccaccccacaacaggctgcggtatgtgatgttccccttcctgtgcccatgtgttctcattgttcaattcccacctatgagtgagaacatgcgttgtttggttttttgtccttgcgatagtttgctgagaatgatggtttccagcttcgtccatgttcctacaaaggacatgaactcatgcttttttatggctgcatagtattccatggtgtatatgtgccacattttctttatccagtctatcattgatggacatttgggttggttccaagtctttgctattgtgaatagtgccgcaataaacatacatgtacatgtcactacatttaacacactggattgccgctctgcatttatgcatgggtcttcttccaaaaaggccacagtagagagaaggaaactctgccatttgcttaaaggacaggttaacataaaacttacatgagttttcggagtttacaaacaggctgagccagcgctttgcaaagaatcgccagggagggatcatcgaggctggtattttccatgtctaaaatctggaagttcttgttggtaatgaacattgagcaaagctcccgccagtagacgagcttctcattgtaactatgagagaacaaagattgtgattctccagtggctaaactcaattcaagacattctcaaaacaggtcgaacaccatttccaaagcacctcaaagctgacagacacccaggcctgaacagggagaaggtcagccaggtaaacggagccaacatgacataatagttagaaagtaggccctggccaggtagagtggctcaagcctgtaattccagcactttgagaggccaaggcaagagaatcgcttgagcttaggagtttgaggacggcctgggcaacatagcaagactccatctctattaaaaatttaaaaaattagacagatgtggtggcatacacctgtagtcccagctatttgggagctgaggtgagagaatcacttgaacccaggagtacaagactaaagtgagctatgatcatgccactgcactaagctagggaaacagagctagaccctgcctcaagaaaaaaaaaaaaaggagcactatttacaatagcaaagacatggaatcaacctaaatgcccatcaatgatagactggataaagaaaatgtggtacatatacatcatggaatactatgcagccatgaaaaggaacaagataatgtcctttgcaaggacatggatggagcgggaggccattatccttagcaaacgaatgcagggacagaaaaccaaataccacatgttctcacttgtaagtaggagctgaatgatgagaacacatggacacagggaggggaaccacacacactggggcctgttggagtgtggggcttgggaggagggagagcatcaggaagaatagctagtggatatcgggcttgatacctgggtgatgggatgctctgcccagcaaatcaccatgacacacgcttacctatgtcacaaacctgcacatcctgcacatgtatccctgaacttaaaagttggaaataaaaaaaaagaaagtggatcctgagacaagagtagttgattggaatcaaactctggtgtaaacatttagtaactatgtgaccctggacaagctattcaaccttattctgcttcatttcctcctcgtttagatgtgaatactcgattgttctgtgaacaagggttatttggtgacccctcagtgaacagggaactgtatccaaaaatgttatcatgaacagcagcatgtatctgagagctaacgtatgagctggtaacctgaacccgatggaagaatacaaggcaaaatcagcagagggaaaaggcatatggaaaaaatgcagaggaaacaaggcacgaacttccaggagtcccctctcagtggggtcactgggggataccgcacaagctatggagggggaaaagaaaagcacagtctgacaacaataaaaatggtgaaaaaaaaaaagaagaaaaggaaagaaagagagaaaaaaagaggaaggaacggagggagggagggaggaagcaagcaaggccaggcgcggtggcttatgcttgtaatcctagcactttgggaggccgagatgggtggatcacctgagttcaggagttcaagaccagtctggctaacatggtgaaaccctgtctctaccaaaaatacaaaaattagccgggcgtggtggcgggcacctgtaatcccagctacctgggaagctgaggcaggagagtcgcttgaacctgggaggtggaggttgcagtaggccgagatcgcgccactgcactccagcctgggtgatagagcaagactccgtctcaaaaaaaaaaaaaaaaaagtcctgctagccgcctcttaatctcacacgagccctatgaagtagacaaaacttttatttctctttatacaatggaaaaagttcaagaagttgcagctcatgatcccacagcagtgccaaggctcgaaaggaaggctttctgactccgacctccatgcttttaagcacagtggcataaggcccatgaaatacccacaggccactagagcaaactccaagtgtagtgtgtgggacgggggattaatagacagactcactctgagatgcatcctgagtcatctggaaagatattctccacacacatgcgaagtgtcgttaaatgttgacaatgcttcaggcagaatgaagctattaccaaatgttctatgttaccaatataaatgaaaacttcttcaaagaaattcatcactttggttacaaattctttttcctgagtttcaaacaaaccaatgaatagttcctggaaagctatggcttccctatcagcttcacattgacttaaactttcaaggcattgggttatttcctgctttaggtcttttgacagtggaaaaccaaaggaggtctccagcatgctgacgatttcttctgttgaaattccaaacatgaatatccccacctgggtcaagagggtttgaggctgaaccacacttgctcttacaagctgggttatgcttccaatggccgggttaggatcgtctttgggtcgtttgagcaaataaaacatggcggcacaaaactcttggatacacagatgcatgaaggcaaaacagtcccctctcctttggaggagtctcatacccacccacatcacgccctcagactcagataacccattcctccggagatccccatgggaaaatacaaatgtatatgtccaaattccctctgcagccaaagcacacaggctttttagtcgggctctgttcaccttaggtggaaaactctgacttcctgctttgaatacagttgttaaaaaggatgcatataaataggtggtgttttgggagtttatttcaaggtcttctcccctctctagcctctgtttcacacaagtacagaccaaccagcacgtaaagggattatggcacaagataaacagcggcccattatctctcacaaaattgaagactttcagggctttgctcttctcaccaaagaagtaggagaaatacgacttcttttcagattcactgaatcctaagagctttatgagttttggatgccgcaacataaaatagtgtttttgcatagccagttttcctaatgcaataaggagagaggattctggaagcatctttttttgcaacaaactgctcaggataattggcattggctgccgctgcctccaatcatcgctcaagtcagccttaagttgtaagttaaacttcagttgctcaaagccatccatgatgaacagaattctctctggctgggaaaaaatgtcttcgatcttctctgaagactccggccagtccctagagaggagctccagtaagctggtctctgcgataccgttcatttcacagacattgaggaaaaacacaaatgtgaacctgtccttccataagtttccctctgcccagtccaacatcacttttcttaaaagggttgtttttccaattccatcaggaccttccaggaccacagtgtgtcgtctagccgcagcagtatatgcgtcattcaattctttatactcatttttcatggtttctttgtagaaatgctcagggacgtgaagacaggtttccttctcccatatgagttgaaatgtttccttcatatgctttctgtatgggtttagcttatctgtgttaatgagaacaggatataagataggtaaaaatgcactcattcttttatacttctgagaactgtaaaccaaaaataaaattctaatactcgccagccatctgaagccagggtgcttttaaaatttaacctgagagactggttcacgccatgatgggaagtgggggtcagacatacttccttgtacctctccattaacaggaacacaggcttgaagtctgataagaaacattttacaacctattctctctgaaggtctcctgtgcaaataaggatgtggatctccacaatcctttatcttaacccagacatttcctttattttgatcccaggtctttagata[138 bp omitted]gccgcagcctcccgagtagctggggctacaggcgcccgccact[187 bp omitted]gaggcacaagaattgcttgaacctaggaagcggagattgcaataagccaacattacaccactgcactcaagcctgggcaacagcctgacactctatctcaaaaaaaaaaaaaaaaaaaaaaaaaaaaaaattactatatcaattgtttctaaaattggtcttgtctatataataaccttcccctactttctgcattttctttaattaaactgatgatagcaggtcacctgtcagcaaagtacacatatatatacacacacacatatatatatatatatacatatatacgcacacacatatatacacacatatacatatatacacatatatacatacacatacacacacacacacacatatatatatatatatattttttttttttttgagatgaactctcgctcttgtcccccaggctggagtgagatggcgctatctcagctcactgcaacctccgcctcctgggttcaagcgattcttctgcctcagcctcccaagtagctgggattacaggcacctgccaccacgcccagctaatttttgtatttttcgtagatacagggtctca[134 bp omitted]atgagtgatgagaaatggggaagggagaagaattaaaatcctgttcataatctgagttttcaaatttcagaaaaattttgagtcttgggaagggactggacggaaggagattgcaaaggggccctacagtcgctcacaggaaggcagggacggttccaccgatggtctgtgctctccttgcacactcgtctgtggacatcacaggagggaacagcatccactttattctccgctatatccctttaacaccgtcgcacaggagttattcaagtctctgagcagtgactgactttgtataaaattaatattgtaaaactgtcttgaatttaaaacatacatgctaggcacggtggctcacgccggtaatcccagcgctttgggagtgctgaggcaggaggagcacttgaggccaggagttcaagacgagcttggccaacatagtgagactccatctctattaaaaaattaaattaaaaaatatgcagataaagagaaaggaaataaggccattccaaaatgtcatcaatgtatgtaatcatggctcatagcttgatctgtgtctgtattactctacatttttcttctgcccgatttttctctctacagtagaattatactgtatatactattttcaaacatggtttttgactgaacaatatattatggacatctttctaaattcatgcacatttttcatcacaaaacactatgctatttattaaaaaatttttttttttagacagagtctcatcactctgtggcccaggctaaagtgcagtggtgtgattgtggctcactgcaacttccacctcccgggttctagtgattctcgtgcctcagcctcccgagtagctgggattacaggcgtgcaccaccacgcctgggtaatttttgtatttttagtagatagagtgtctcaccatgttggccaggctggtctcgaactcctgaccttaggtgatccgcccacctcagcctcccaaagtgctgggattacgggtgtgagccaccacgcctggcaaaaccctatgctatttaattgaatggatttatcattatattattcactttctatatttgcccatagtaaacatttgctgacctccaag[179 bp omitted]gtggcaggcgcctgtagtcccagctacctgggaggc[144 bp omitted]tttaggacctcagtgtcccaagtgagaaactctcagttcagacactgactcggtcattttttcatctgccaacatagaacattaatcagcagaaaagtcaaagacacgaaccacacagataaagaaaactggcacacacctgtaatcacagcactttgggaagcccaggcaggaggatcatctgaggtcaggagtttgagaccagcctgaccaacatggtgataccccgtctctactaaaaatacaaaaattagctgggcgtggtggtgcatgcctgtaatcccagctactcgggaagctgaggaaggagaatcgcttgaacctgggaggcagaagttgcagtgaaccgagatcatgtcactgccctccaacctgggcaacagagcaagactccgtctcaaaaaaataaaacaaaaacaaaaaaaaaaacaaaaaactaacacagcaagcaactccaaaccaaataaaataccctcaagcatgtggggatacgaaataaggtctcaaattagaattaccaacacaaagaagaaacatgaacaaaacagaagtaaacgtaacagaagttgatggaactcaaaagtaaagggagaagataacaatcatcagaaacaaatgctaattactagatacctaatagggaatatatttagtttttcctaagtatcccccgagaggagggtgtagaccccatcaatgagtccagcagaactggttcggagtcagatctgtcacttttggaaaagtcatgtaacacatgggaacactgttttgtccagttttctcacttgtaaacctttcctgggttgtgataagaatgaaaagacattatgcagaaagaatgcttccaggacgtgaggacaacctggctgtgatgtctgtcaccccattggtcgccccagggctaattcggctgatgtggccagctgggtgggtgtccacttcctccctcactgctccatatgcgtccgtcctgaaagtctcccctgggtcaaagacgatgacaacctttgcccatagaggaaggtccttccatcgcgggcagaagagaagctgtgctcccctactagaacctccaaacaagctcgcaagaatgcttcctgtagtacccgggacatacgctgtctgattgtcttaagattctacctactccttggtacatgtctggtcaaaaaggacaggcagttaggcatggtggctcactcctgtaatcacagcactttgggatgcctaggcaggtggatcacttgagcctgggagttcaagaccagcctgagcaacatggcaagaccctttctctaaaaaaaaaaaaaaaaaaaaaaaaaagataggcaactaccatactagaattccatctcagtagacctggcaatgcagacactaactggccactcatctcctataacaacgactccacttggggtggaaaaatgggaagacactccataggtgaacagttggtatcaggacgccatctgtccccagttcatcgctggcccacatatgaacagccctggcctgcaactcttcctaccttcaactctcaccttgacccacacacattctcatctgatggagggggtggccactcatttaacaatgctatcaccttgttcccaggcttcccccatgggtcctcgccccatcatccagcacttacttctcatctcttcctgagcctttgtccagagatctttcctattgatctgtagaaacaggttcagtgttacctcccatgcctgctttcctgggtaatgtttgtccagcagctttgctacatcttctttggaggccttcttcagctcagcccaggggattggcttgagttcaaatttctccaaaggttgtttgaggagctccttaaatttccaaaactcttcctttctgagctccttcagataccacaacaagccaaaatccgaaaaaaaagattctgccatatcgccccaggattgtgaactgaggtgtctccagagggaaaagaaagatcctcaaaaataaagaataaatgatacctggagaagaatgacatgattacagagttaagcttcagcagctgaaagcagctcaaaattattgatatcatcatgcgtagcttgcaccaaacatcatctagggaagaagcttcatctttttccaaacaaatgcatgtgaatggtagagttgactgccacttatgtgtcttgtttttgtctgacataaatgatgcttccaggaacaagtgtttttgtgtagtttggtgtatataagcacacatttctctagatttataaattataggtcaaacagcaaacacaggtcaccatgtttgctacataacactcaacggttttcccttgtgtatataattactgacattcctaccagcattctatgagtttgtttgctctgtagaccttcccatccttagtatagtctaatccaattttgataatgaaaaaatgaacggatattaaaattacagatgatcacattcaggaagatgaaaataaaggaagagga[202 bp omitted]accaca[172 bp omitted]gaaaaagttagatttactataggttagcatctgcagacaactcagacagaaacagagcagtgaacgttcccagtattataaacccttcagataatcattgcaattcaacaaaagacaggaaatgaagtagaaatatatggtagacaaaataagacaggtggcaaaaataataccaaatatatatagatatgtattttgagatagagtttcactcttgttgcccagactagaatgcaatggtatgacctcagctcactgcaacctctgcctcccaggttcaaatgattctcctgcctcgtcctcccaagtagctgggattacaggcacctgccaccatgcccggctaattttttttttttgtatttttagtagagatggggtttcaccatgttggccaggctggtctcgaactcctgacctcaggtgatccacctgcctcagcctcccaaagtgctgggattataggcttgagccactgcgcccagcctaaatataatcttaacacatatgaatgaaataaaattgctcactaatatatagactcacattggataaatacaaatcctgctatatgctgtttataagagaatcctagaaaatacacagagaagtaaaacagaagaagaaaaagcctggcaaattcttacccaaaaaagtattaatagtataaaatatcagcattgaaaaacactcaagctagaaagcactaaatggactaagaatttttgaacaccaagattcagttccccaagatctagaactcatgagcatatgtgcacctgggaataccactttacacataaggagatgatgacaaacgcaatatcattgtatctgagctaatatacctttcagataattacaaaccattagcaaaggttacataccatctatggtcacatgcaaaagaataaacttggacccttaataccataaacaaaaattaatgcaaaatggattgaagaagatctaaatggaaggcccaaagtataaaactcctaggagaaaatgtagggcagaagcttccagacacagatttggtctggattatttcttgaatatgacatgacacagacaaaagaaaaaaatagacaaactggactttataaaaattttaaaattttgtgcatcaaaagacagtatcagccaggtgcggtggttcatgcctgtaatcccagcactttgggaggccgcagcaggtggatcacttgaggccaggagtttgagacccatggcccacatggtgaaaccctgtccctactaaaaatacaaaaattagccaggcgtggtggcagacacctgtaatcccagctgctcgggaggcggaggctgcagcaagctgagatcacaccgctacactccagcctgggtgacagagcgagactctgtctcaaaaacaaagacgatatcaaaagagtaaaaagtcaaccaacagaatgggagaaaatatttgcaaagcatgtatctcacagggattaaaatccagattacagggaatgcctaaaactcaataacaaaacaatcttataacaatgagaaaaggactagaatagacatttctccaaagatatacaaatggtccatagccaataagcacataaaaagaggctcaacgtcactaaccattagggaaatacagatcacaactacaatgagataatccttcacatccactaagatggtaactacaaaaaaaaaaaaattcaaaacaagtgttgatgagaaggtagagaaactggaacccttgtatcctagtgacgtataaatgttaaatggttcagccactgtggaaaactgtatcatatttcctgaaaaaataagaacagaattactgtaggatccagcaaccccaaagaattgaaagcagactctctcagagttatccggacactcatgttaataggagcatcagtgacccaagtgttcatcaacagatgaatggaaaagtgaaatgcagtctataaatacagtattatacagccttaaaaaggaaggatgctgggcccggtggctcctgcctgtaaccccagcactttgggaggctg[137 bp omitted]gctgaggcaggagaatcgcttgaac[142 bp omitted]tgtccccaggctggagtgcagtggtgcgatctcggctcactgcaagctccgcctcccgggttcacaccattcttctgcctcagcctccggagtagctgggactacaggcgccggccac[184 bp omitted]ccttgaggacattatgccaagtgatagaaaccagtcacaaaatgacaaatactgttccattaaacgtatatgaggtacttaaagtggtcagaatcatagagacaaagtagaatgatggttgccgaggctgaagaagaaaatggagagctattgtttaatgaggacagtttcagttttacaagataaacagttatggagatggatgtgacgatgcttgtacaacattataagtgtatttagtaccactgaattatacacttaaaatggttaagacggtaagttttgtattatgtgtattttaccacaataaatttcttgagacaaggtcttgctctgtgcccaggctgagtgcagtggctcaatcacagctccctgcagcctcgaccggccccccacccacacccaccggggctcaaggacctcctcagcctccccacctccgcctcccaagtagctggggctagaggcacacaccaccaggcccagctaatttttttagatttttgtagacatgatgtctcactatgttgcccaggctggtctcaaactcctggtctcaagtaatcctcccacctcggccttccaaagtgctgagattataggcaagagccaccacacccagcaaaaaaaaaaaaaaaaaaaaattagtaatatgctattgaggtaatgcacaagtttgtgacatatgtatgtgaaatatatgtatacattttttaaagggaaagtggtttgattccaaatcaaatatgtacatttcattcaaacgcatatgggacatttactaaacatgaccttatcttgggcataaagaaaaactaaaagagaaacaggtattctaaatcagagatcactggtctcattcaacaatcacaataaaattagaaaataaaggc[149 bp omitted]gcctcagcctcctgagtagctgggattacaggcacctgccaccacgcctggctaattttttttatttttagtagagacggggtttcaccatcttggccaggatggtctggaactcctgaccttgtgatctacccgccttggcctcccaaagtgctgtgattataggcatgagccacggcgcccggcctccatagttaaattttaagtgtacattttaatgtaacaggcaagtaagaagctaatttaacttactgagaaaggaacagacaaacttcatgaaataaacttcaatggctgttaaaaataggaaaaattttctagaagctcattttccatccagatttgaaatatataggccgggtatggtggctcatgcctgtaatcccagcactttgggaggctgaggtgggtggatcacctgaggtcgggagttcaagaccagcctgcccaatatggtgaaactctaactctactaaaaatacaaaaaattagccgggcatggtggcgcatgcctgtaatcccagctactcgggaggctgaagcaggagaatcgcttgaacccaggaggtggaggttgcagtgagccgagatcacaccattgcactccagcctgagcgacaagagcaaaactcagtttcaaaaaataaataaataatatacataattttcatcataatatatggggaaatggatgttaaacaatggtggaatacaaatgcatgtaattttggaggaaaatgtggcaacctctattaaaatggaaaatgaagattttcttcaaccccacgattttactctctggttatccattccaaagtagcatttgcaaatgtgcctagagttttgtgtgcacaaatggtcgctgcagggttttaaataattgttgaaagcaaaaacctaaatattcataaataagaaaacagttaaataatggtatactattatagtacaattggaccattgtatggagtcagacggagactagaggggctggagaagatacggggagtggtttgatggacattgcatagagtttcagtttggtatgaacaggttctagggatggtggtgatgaccgcacagcaatgtgaatgcacttaatgccactgaattgtactcttaaaagtagttaagatggtaaattttatgtatatttcaccaaaagtttaaaacaaacaaacaaacaaaaaaacaaaccccacatcccctcaatctcttctccgaacattcctttctcctccctgctctaggggacacccccctctacagatactgagtctcccgcggctctctcatgccgacggtttcatcagccccattcttcatgctgtggagtccagataaggtatagataccctcgctggtgctccctaacacctcacagactttcggccaacactaggctccaccacccattaccattttgtgttgttgccatccaaggtctctggcacaatctcctcattcctcccagattctaccccctggctcacccctactctcaagctattcttgtgggcatgcaaagcaaccattactgacaacgtgatgaatatgtcatttagcataaggttaggacattttagaactggctgataaaagattacttcaaaaccaaccagccaagtcaccagatcaacaggtctcaaacttccttctctccacttcactctttctcactgccagagatttggtgttttattatttgtctccccaggttacatgaatcccccaatcagaaccaacagaccaagtctggaaaatggaccttcagttttcgatattttcatcatttctcctcagctctccaagacctccaattttctgtatctctaattcaatttcagaaaaaaaaaaataaggagacaatgccttctggaagagtccctttctctcacccaatttagagtccggaaacacaaaagttaacaagtgaaagtgccgggtacacaatctctctgcaaatttatctggttttcattacaggccgggagcagtggctctcacctgtaatctcagcacactgggaggtcgaggcgggcggatcacttgaggtcaggactttgagaccagcctggccaacatggcgaaaccgcatctctactagaagtacaaaaattagccgggagtggtggcgtgcgcctggagtcccggccactcgggaggctgaggcaggagaatcgcttgaacccaggaggcagaggttgtggtgagccgaggtcgcgccattgcactccagcctgggtgacaatgcaaaactccatcttaaaacaacaaataaataaataaataaatggttttcactacaatgcatccttgccaaaacaaaaggtcaagacttgatcatttctggtgccctcttacctgttccttatgcactccagaccttcaggaagcactgagactttagggaaatgaagaagaaagaaaggtcagggggaagacttacccaacccagcccctggtcctcctggctggaactcaacaaagaacagcggtggaaacttagaataaaaggccctggctgctctgtgactggccacagaatctctccttttcattggctgtcatggatattgatgactagacccagacggcaattgtttaggttcttttttaactcctcaggtgtgaatgcttttcccccagctggatagtccgtgctgctgttaatatcatctccctacgtaatataatatgatcacagggcttctgcgaactatcttctcccgaccaatgagagctggtttggagactagtaatgggaaccactgttctcataatctgagtatctgactcctcctatgaacttcctaaggaaatctattttgtgcatgtctcaacttccgctttaaaagttgagcacttaaaaaggagcatttgcatgtaaggaaatcaatgaatatgctcgagtaactggctttggatgtaaagggcagaagtcagaatctgcagttgtctcccaaacaccctgttaccctcatcattgactcctgtgcgaatgctgccccctcttcacgctcatccccattatccctcccgcagctgccattcttgtccccaccctctttaacattaattgaatgctaatggtgtaaaagccctacagctgagtgcatttcatgcaagatccttctcttcacagtcctcggaagtagatagcattattattcccattgtcaaagatacttgaggccatcagggtggaggctagagttgagaacattcctacttggtcagcccaaattttaaccgctgcattgtcctgcctcccagccatcattgatcccagtgaggcttaggaatgtctgtgttggatctgtggggagatgtggctcagttctgcctaatgagactgagctaagagactcaaagaatctttcctctccaggatcttggcctttctttaaccagctactcaccatcaaaattctgacctgacctctttaccctgactgcttaaaccatccttagctgggccggggtgcatccattagagggctgtgtcttgatctccctttcttcagtttttctgatagccaccacaggatctggcatagaaggttagaagtggttaagcacttgagctggaacagcaacctctattctagactgttggtgtggctatgggcaagtatttattaacttcacttgtttttcctcttctgtgaaatgaagaggatgatgatcgtgatgatattgatgatgatggtgatgatggtgatgatgatgatgacggtgatggtgaagatgaagattattatggtggtgatgatggtgatggtgaagatgaagatgatggtgatgatgatgacggtgatggtgaagatgaagattgtgatgatggtggtgatgatgatagtgatggtgatgatgatgatggtgatggtgaagatgatgatgatggtgatggtgaagatgaagataatgatgatggtgatgatggtgatgatggtgatgatggtgatgatggggggcggaaagggtggctgggctgtcacttggtttctcttttgtgaattgcctgttcttttccttaaagatttacctgactttatgtatttttttgtgtatatttatgcaaaatacaatttgctggttaatatagaatcataaatctttctaaaatttgggattttctatttattgtctatggtattttaggggtagagttgttttaaaatgtattaatgtctatttttattaatcttatcatttgtgggtgatataaatacttcctgtcctgaaagtcaactatttccctatattttctttcacacattaatatctctttttacattttcaattcacttatacataataaatcttcataatgtgatgtagtggttcagttttatctattgataccaattacttcaacacatatattgcatagcctatcttcccataccaattttctggcgccatccacttgttgtgaaacacccacctgttgccttgatctctttctgtaacttttgttgtactatatttgtctattttctgttactgctacaatatcataccactttacagatattgagtattggccgggcacagtagctcatgcctgtaatcccagcactttgggaggctgaggcgggcagatcacctgaggtcaggagttcgagatgagcctggccaacatggagataccccgtctctactaaaaatacaaaaattagccaggtgtggtggcacatgcctgtaatcccagctactcaggaggctgaggtggaagaatctcttgaaccccagaggtggaggttgcagtgagctgagatcgcgctattgcactccagcctgggcaacaagagcgaaactctgtctcaaaaaaaaaaattgaatatttctgtattacgtgggtttatagtaatgtatttccatatgcatttttatagttttatcctgcatactattttaataatattaaagttattgcacagtgccttttagagtgttgagtatcgggacacacattctcacgttgtgtcactgattcttgctcatgggaaattgtttccaagtgtgtcttgtagttattttgaagcaatgaataaggaatattttcactttggtgtgaccatatggcttcacttgcaaaaggtaaccaaaagtgttcaattctgcttctggtaggttcatccaagtaggccttgtctctcataagtgtgagggttagtgtgttggtttcgtattttttctttcactatccttccatgaaatttctgggactgcctttggctttcaattcctaatattttaaaattgccgagaaacaattgtcctttgggggaagtaattggcttactttctctcctggcatagaggtaaggattctgttgctgaatcgctagagtttcagcacttcaagaatctcctgtgagtgaagagttcagtttctgcatctcacttcgccagtgtcaacgcttacacccgtccctgcctgagtgttgagtctctgggcctcaaaggaatccaactcatttctaactctgaccctccaaccatgcccaaagctcgtagtagcatggacttgagagggaacactcggaattccatttcactttcgtttacacgtcctggaggtttctttagttttgttgaaagttcacctttcattattatattgatgaaattagagttaattgtgttagacataattatgccaattataatgatggtgaaatttttcttttaatttcaggaaattctgcaggcagttatctctttctcttttggatatatattagttctttaatgaattgcactatgccttatttcgttctggctgaaactgaatttcccatcctggctgaatattatattagttagaccatgcctattaagaagtccattggtgtccgggcaccgtggctcacacttgtaatcccagcagtttgagaggccgaggtgggtgaatcacctgagatcaggagttggagaccatcctggccagcatggtgaaaccccatctctactaaaaatacaaaaattagctgggcgtgttggtgggtgcccgtaatcccagctgaggcacgagaattgcttgaacccagaaggcagaggtgccagtgagccgagattgtgccactgcactccagcctgggtgacagagtgagactctgtcttaaaaaaaaaaaaaagtctgttggcaaaatgttagaagttgcatcttatccacatgtaacaaatatgtagttagagacccttttgataaagcctattcacaagtattccctaaaagctcactcagaagataaaattgtttcttcagatatatttttctaattgcaggaatttattttcagaaggctttttttttttttagacggagtttcgctctgtcgcccaggctggagcgcagtggcgcgatctcggctcactgcaagctccgcctcccgggttcacaccattctcctgcctcagcctcccaagtagctgggactacaggcgcccgccaccacgcctggctaattttttgtatttttagtagagatggggtttcaccgtgtcggccaggatggtcttgatctcctgacctcgtgatccacccgtcttggcctcccaaagtgctgggattacaggcatgagtcgccacccccggcctattttcacaagttttttaaacaaactggaaattctcttgaaatgacttggaaactaaacaagaacctttttgaacattttatttgccaaaaagtagtaaccaaaataaatgatattttaatttcttttttattaaaagattttccgctagctttattaaaatataattgacgggtaaaaattgtacatattcaatgtgtttgaaacgataattcgattatacataggcattgtgaaaagattaccacaaccacattaacacgtcatcacaattacttaactttttgtgcttgcgtgggataagaacacttaaaatctactttcttcacaaattgtaagtaaactgtacagtattattaaatatggtcatctccttgtacatcagggcttcagaatttattcatcttattattgagagtttgtacccattgaccagcatcttttcatttcctcttctcccagcccgccacctctgtactctctgcttctatgagtttagctttttaaaaaaatattccatatacaagtgagatcacacaatatttgcctttttgtatgtggcttatttcactgagcaccacgtcctccagactcatccatgttgtcacaaatagcagaattttcttgtttcttatggttgagtaatattcaaatgacagttttataacttcatcatttcttctacatttattagctgacgttttaatagagggatgaattttactcacttgttcgtttatttttttctgtctgatttttaaaaattttcctttaagttattggggtacacaggtgatattaggtcacatgagtaagttctttggtggtgattggtgagattttggtgcacccatcactcgagcagtatacacggcaccgtatttgttgtattttgtccctcgcccccctccctctcttccccccaagtccccaaagtccattttatcattcttatgcctttgcatcctcatagcttagctcccacatatcagtgagaacatacgatgtttggttttccattcctgagttacttcacttagaataataatctcgaatctcatccaggttgctgcaaatgctgttaattcattcctttttgtggctgagtagtattccaccatataaataaaagtagaactaccatttgatcccgcaaccccactcctaggtatctacccagaggaaaagaagtcattatatgaaaaagacacttgtacacacctgtttatagctgcaccattcgcccctgcaaaattgtggaaccaacccagatgcccagcaatcacggaatggatgaagaaactgtggtatatttcacttgttcatttcaccagtattgattcattgattctcatttcattctcaaggttatgttattgtaaatatttagtttggtattcaaattggtccacattcggcaagtgggacccacttcaatttcattttcatttcaagatc[167 bp omitted]gcctcccgagtagctgggactacaggcgcccgccaaca[174 bp omitted]caggttcctctagtatttcccttgccccagccctgatttagctatttcttcaaggggtcttgatttctcttagtgtagaataatatttaaaattcaagatctaggtaccagttcactgacttttgataaaaatatatgcccacatactaccaacccagtcaagatatgagatgtgtccacattcctagaaagtgcgcattcttcaacagtcaatgtccctttctaatatatgaaaacatgtttggtgccaaagcttaaaactaatagtccataaaactgtgattcatcagtttattttaaaagctatttctactgcaggttaataagaaatacattacagaaatgcattgttgcttatgatcctaacactgtacgtgccattttgttctatttttaactttaactttacaaaattctgaaatctacatactgtgtttgttaaggactggaacgatagacataaaattcaaatgtgactgtggatgaatggataaagaaaatgtggcacatatacacaatgaaatactattcagcctttaaaaagaaggaaatcctgttatttgtaagaacacggatgaacctggagggtattctgggttttttcattagtctttccatttttttttgtttttgtgggtacagagtaggggtatatatttatggggtacatgagatattttggttcaggcttgccatgtgtaataatcacatcaaaatgtatagagtatccatcacctcaaggatttatcccttgtgttacaaacaatccaattatactcatttagtttatttttatttgtattttaagactgtctcactctgttgcccaggctggagtgcagtggcaccatctcagctcaccgcaacctctgcctcctgaattcaagcgactctcctgcctcagcctcctgagtagctgggattacaggtgcacaccacggtgcctggctaatttttgtatttttagtagaggcggggtttcaccatgttggccaggctggtcttgaagtcctgacctcaggtgattctcctgcctcagccttccaaaatgctgggattacaggtgtgagccaccgcgcccggcctcttttagttattttttaaatgtacattaagttattttttactatagtcaacaggttgtgctagccaatcctaagtcctattctttctattttttaataccaattaaccatccccacttccccgccaagtcccctctgctacgattcccagcctctggtaatcacccttctactctgtctccataagttcaattgctttaatttttagctcccacagataagtgggaagtttgtctttctgtgtctggcttatttcacttaacgactggaggacattatgttagatggaataagtcaggcacaaaaagacaaatatcccatggtctcacttatacgtgaaatctaaaagaaatttgatctcagaactagagagtagagtagtggttattagaggctgaggaaggtaggagaaagtaaggaaataagaagaggtgagttaatcaattgaggtcaagagttcgagaccatcctggccaacatggcgaaaccccttctctactaaaaatacaaaaattagccagacgtggtggtgggcgcctgtaatcccagctactcgggaggctgaggcaggagaatcacttaaacctgggaggtggaggttgtagtgagccgagatagcaccactgcactccagcctgggcaacagagtgagaccctatctaaaaaaaaaaaaaaattgacagaaggaaggaattcataataaatgtgggtttccacgttaagcaaaaacatttgtggtaacctctctatataccattagtaaaactcttatttctgcctaaattaaaatatgattggattaagaaggtgtggcctgatgtgattaaggtgggaagaggtaccctcttcaataaaagcctcttgcccatggatgtcactccaaaaccaaattatttcagaaggttcgaagccaaaaaaaaaaaaaaagccaaaaaaaaaaaaagccacaatggaagaaaggtaaatccaattttatataatttacatttctacaaagggcagagagagcaaagtccagggaactgggtaatttattaattcagcaagtgttgtgtgaagccgtgaagccaactccatgccaggtacagtgtgtgcactgagccctctgccctggcaggtattggcaggacttcaatttcaaaacccaggctggtgtactgacaagggccttcattttctttaatcaaatcatagcttcaaagactctgcaggacgctggtgagttgagtctcagccattaacttactcaatttctcaggtcccgttagtttttcccacagtcatattagacctgctgggggggagtcggagggtctttcagtctagaccagagctgttcataagaaatatactgtgacccatatatgtaatgataaattttctagatacactaaagaaaatggaaggcaacatgttgaattaattttaacatccgaaagatttgtcattttaaaatgtaaccaatattaaacagctatgaatgacgacctttttcatccaacatcatcacgatctagtgtgtgttttacactcacagtatgtctccattcagataaactccatctcagcgggttgctagccacatgctgttggtggccaccatattggacagcccgggtctagaccctttttaccacttcaactctatgtcgaataatgaacgatattcttcattccagctagcatgtgaaattcagaagtcagcagccatgactcttcacgtctgtacccgtattgcctggtacaagggatatcacatagtaggtacacaatccctaaagtgaaagaaccccagttcattcgtctcgtggaatctccacgaagaggcacattttccccccaggcagcagccacggctgaacattcgtgagaagcaagatgtcttaactgtctggcctgtctcgagaaacttgtattcttgagatgtagatccatcagctgcatcaattcactgaagaggaagccccaaagtggagggtgtatggtgccctttctgtaccgtggtcactcagaagaatgagatcaagatcaactgtcaaccggggaagccagcttccgagatcaaagaactagagccacacctgagatctgttctacagctgaaccaaggatgctgaagttccaaggtaaagtatctgccccacctagaccctccccacaaagggcctagggaaaaacaactgggcaaaagcctcttcacctaatattagaaggattctggctcctaacattgtatgcacctttgagcatcagtggttcttgcctctgagtatagaaccacctggagatttttaaggaaatggaatattcagctcatgccctagccctgtgctgtccaacagggtagggactagtggctctggaccacgagaaacgcagctggtacctagtggaaaggatgctattctgtacatatcgggttcaatgaaatatattactgaagttaatctcaccaggtcttttttatgtttttgaatgcagctactagtacatttacgagacatgcgggtcatgttatatttcttcaggcagcactggcctacaacttgaatatttgttaaattgtctgaggatcttattaaaatgtgcattctggtactacacctctgggatctcctgagactcaggatttctgacaagagcccagaaatttctgacaagagcagctgatgctgctggttcctgaaccatatgttgttttgggtttttttttccctcctttactaagttcttttttttcttttccttccaacttgtattttaggttcatgggggtacatgtgcagctttgtgacatgataaactgcatgcctcaggggtttggtgtacagacagtttcatcacccaggtaatgagcacagtacgtgagagggagttttttgattctcgccctcctcccaccctctaccctcgagttgcccccagtgtctttgttcccttctttatgtccatgtgacctcaatgcttagctctcacttctaagcgagaacacgtgatatttgctttcctgttcccgtgttatttcacttaggacagtggcctccacctggatccatgttactggagaagacatgatttcattctttgactgtgtagtattgcatggtgtatatgggccacattttctttatccagtccaccactcctggccatctaggttgattccatgtctttcctagcgtggatggtgttgtgacaaacatgtacgtgcatgtgtctttataatagaaaaataacaataatcaaaatttatacattacattggtacagattgtttgattctaattagatttttttttcaagttggagtctcactcactctgtcgtccaggctggagttcagcggcacaatctcggctcacagcaacctctgcttcctggattcacgtgattctcctgcatcagcctcccaagtagctggaattacaggtgtgtgccaccatgccgggctaatttttgaacgtttagtagagacgaggtttctccatgttggcgaggttggtgccgaactcctgacctcaagtgattcacccgcctcgtctccccaaaatgctgggatcacaggcaagacccgccgtgcctagccttgaattagattttaataacatttgtaaaaacaaaaagaattgaaaaacttctgccgaacctctgtagtgagttttcacttcagttattttactttatgcccctcaatttctaattagttcatttttaaaatttctatttggttattgatattttctattttgtgaggtgttactcttctaatttacttcagttctttgcctgttgtttcctttagttcttttggtcctccttcgacaagtaatttagtctgcagagaggaagcccaaggtcttgagcacatttatttcatcttgtgacttgtagacattcggttctctttgtgtgcctcatatattttttgttgaaaattggaagttttctgtggcagacgcagatcagattctcaaagttcacaggtttttttttttgttttgttatacttgcgggctgtagttttctgtttttgttttgttttgtttggacttaatgaaactattttgcaaaaattctgttttttctcctctgtgttctcagctcatcctgactgacacttctcctcacagaacttggtaaccagacgacccacatgagtgcttccttatatcctgggcaaaacacagaacctaaggaatcttgaagaaaaaaattcagagccacggttgagcaataacatgccctgcctggttctgagccacctcatccatgccccggctggactgacagtggggccacgtgctgggcagtggctcagggtgggaccacaatgtcctggttcacctcaaatccgtttgccgtaccaacactgacaatgagagaaaggaagacagtttcctttggaaactgagccaagccctgggttgtcagaaactctgagcttctcttcattgttaaagaagaaaatgtggcacatctacaccatggaatactatgcagccataaaaaaggatgacttcatgccctttgtaggcacatggatgaagctggaaacaatgattctcagcaaactatcagaagattggaaaaccaaacaccacatgttctcactcataagtgggagatgaacaatgagaacacatgggcacagggagaggaacatcacatactgggacctgtcggggggcggggggttaggggagggataacattagggagaaatatctaatgcaggtgacgggttgacgggtgcagcaagcccacatggcacatctatacctatgtaccaaacctgcacgttctgcacatgtaccccagaacttaaagtataattaaaaaaaaaaagaaaagtttgcttgtacagtgaacagggcctggggatcggaagccaccgaagccaaccatttacgtcagcttctgtgacacgcctgcagggacggggcatggagaatacagacctcgctgactgggatgttgaaggacaggtttttattcaaacacagaagacccctaaagtactgaactgtacatgagagtgggcaaggaaactttaccactgtctgaatagaagccagcggagctgctttctgtgaaaagatgcaattggaaaagatgtggaaagtatctaacacccaaaccaaccccaccagtgtgccagcaatcctaagacgctattctctaattctgaacggaagaactcctctcccaagacatgagcatgaatgcaattccaggctgtaagatattttgggagactattagagaggcaaatcaacccactgggcttggtgctttccacaactgaggccacctggtattcccaaagagaacagaaatttcgttcaagctttacgggaagcagataaaaattaaaagatgtgagggatcagtgctccaggaacatgggcccataaaattacaagctggagaataactgctcccagaaatgtgagtatattttaaaaggatttatatgagaaaataaagcaattagaattatgcaagaagagataagcattttctccctgcatgcatatgtgtagatacggtatgtgtgtatacatggacatacatgtggcagattatattataggtcccaatcaatgaagaaatgcaatgtgcaaggatttcatctaatatatgcaccacaacgtagagatttgtgtttctccatttgccttcatgagacaaaaggaattgagaactgccttggctttgaataggaaagaagagaatctagcaatcactagagaatgattactgtggagatgattaaattaaagactattaatttaatcacattaatgtaatcaaatcctttcccacctgacctccagtctcccacttttacattcttatccatgaactctgatcacctataatatatttaatacatgaggaacccgtttttgaacatttttaaagaggaaatgaatctcattttacttatgttgtgatgtaagggaaatagattgtaacagtaacgtttaactttcattttagatgctgcaactacaaagaaaaacggactttcactggctgactgattgtctggaaaccgttttgggatttctttcctaagcttcttaattagaatctttacattatagagaaaatgattttgagagttgagtgtggtctgtggagtgtcctattagtaacgacttctgagtaggtttaagtcacctcttttattgaaatgtgaaaaggtgtgacatttataatagaaaactctttgaaagtcgcaccgttcattttagaggaattttaaatgtcaccccaaattttacgattttaattaattttaattaatttccaaattttaaccaataggcataatattcaagatcttatctaaaaattattacatggcaatattttgtccttgttaattaaaaaataacactgaaaacacagtcgtcttcctttaaggtaaaaacctgtccaatagtaacaatctcaatgatggcagaatgaaatcagaatctgattggattaaaaaggagggaaagggtgtggctaaggtgggtggagacaccctctggtataaaagcccctggcaggcagctctcactccagatctgagctgtccgcagaagcagctggaggccaggggagaaactccagaaggagaggtgagttcaatcttatggaattcatttttacaaaaggcgtatgagagtctaggggaatgcaataatgtcttgattccacaagtgttgtctgaggccaaggccatgacagacacactgtatttctggaggataaggggacctcttccctggtaacagttaggtaagtcttagattttcaataccaaggcgagagacttgacaatctccatttgcttgaatttcgtgagaatttggtagactttctgaaatgatggacagaggttcggtggctgcgttactcaacgtcaggttttcctatgggtttggtattgttttcctattctccccttcccacaacccctggcaaccatcattcttctcttattttctgattttttttttgttcagttttttgttccttttaattcagaaagagaaagggaaggaaatgaaaagcaaagtttgtttacattactattgcggaaaagatctggccagatgctgggacccacctcttccaggatggggattcattatttctttaattgttttgagacagggtctcgctctgtctgccaggctggagtgcagtggctattttctgattctatgagatcagtcaactcagattccacataactgagatcatacagtgtttacttccctcagcctcacttatttcacttcccatcatgccctcggccttcatccacattggtgcaatgccagaattgccttcttttttatggtagaataatccaatgtatataccaccatttcctcatccatgtttctctcatagactctggggttgtttccatggctcttgtgaataacgctgcagagaacctaagagtgcagatgtctctttgacatgctgacttctttctttcacgtagaaacacggaagtagggttgctggaacacaggcagttctatccttcatgttttcagaaacctccctactattttctgtagtggttgtaccattttctttcccaccaaccgtgcacaagggttcccctttctccacatccttaccaacacttgtcttttgtctttttgatcatagccatcctagcagagaggggttaatatctcatcgcggttttgttgctggagggctcaggaggctctctggatgccagagagaccccagtcccagccagtttccaggttctggatgctgtcgggagaacgaattcagggatgagccagaatgaagtgaaaggcaagaagtttttattccagagcaaaagcacactgttaggagagaagtgtgggcgtgattctgaaagctggtggctttcgatggccttcggggtttctatttttgtcagtccttctaattaggaggtgaactaatcattaggttttctaggaaaaagcagagattttttagaattggtgaggtacccatttttgtactacatatgggcatgctggggtcagccgtgacactgcagaatgtgtgatttagtgtgataatgaccacggtcattactgtggcaatgctttgaaacagcttaactccctccggttttttatcacctcatgagcccaggttcctccttgtccttgtaattttaatgacaagtggctaattttaacagccactgttttggtcctatgtgaaaatgtcactggatacgttctcgattctcttgtgaccacacagtattcctgcctcagtttaaattgcatttctctgatggtgagtgaggttgagcttgttcctcagtacttgctggtcgttggtgtgtgcttttcagagaaatatctattcaggattctgcccattggaatttggattattttggcttttttttctttttgctacagccttgaaaatattccttatatattttggatattaatccattgtcatatatatggctgcttgtttgtttttcattagttctggtttttcctttttttttttttttccgctatgcagaagattcagttttacctggtacgacttatttgtattttgtgtcttgtccttttgttgcactatcagggttttcaccacatgcagtttgcacagttggggaagtagaaggtcttcaaatggactccagcactgtccaatagaaacataagataacccatatatgtaatggtaaattcagtttctggtagtcacataaaatagaacaaaacaagcctaatgaattttaactcaaaatataatatcgtttaacatgtgagcaactttaaacgttctcaagcagatagtttacgttctcttttccccattatgtcttcaaaaataagagcgtatttggctcacagcacatctccattcagatacaccccatttcaggtctcaatagccatttgtcactggtggctaccatatgaaacagttcaggtgtagactcctttactatttcaactcaaagtctttcggtgaatcatgccctttattccaatgagtattacagatattagaagttcagggcctcgagtcattgacatttgtattcatgttgtgtcttcgtcactagcagtagtgattttaagtgtcgtgctatgatagctccatgcatgtaaagataaaagccccaaacactatcagctgttcattcagctcgtggaaattctaattctgtgttcattttttttctatagacatttgccatggctgagcacttcaaacagatcattagatgtcctgtctgtctaaaagatcttgaagaagccgtgcaactgaaatgtggatatgcctgctgcctccagtgcctcaattcactccagaaggagcccgatggggaaggtttactgtgccgtttctgctctgtggtctctcagaaggatgacatcaagcccaagtacaagctgagggcgctggtttccatcatcaaggaactagagcccaagctgaaatctgttctaacaatgaacccaaggatgaggaagtttcaaggtaaggaatctataggacctgccacaacccataaaaggcactgggaaaatgtctttcaaacatttcttcattaaacataggcattagcaggatatctagcatctaaaacttccatgcttcacaaacaacagcagttctcacctttgcgtagagattttcatggaatctgtgcaagtttgtagaatactttggagagcaagctcctgtcttctttcttgtatcatatgtgctaaatggaaagctaattttcatcaaattatccactaacttatttcgaaaggcatttctaatatgaataaggtggacttgttacaatgatcatattcatgcaacctatagatacaatttaacctcatcaggtggccaaacaagtttccccaggaaattttgatttgggaaagaaagtagaataaaagtaaaagtgaataatgtgtttaagtgtttgcagtcaaagggcagagggagtctgtagtgtgtgtctttgctgaactcctggttcttctttgcacagtggatatgacgttcgatgtggacacagccaacaactatctcatcatttctgaagacctgaggagtttccgaagtggggatttgagccagaataggaaggagcaagctgagaggttcgacactgccctgtgcgtcctgggcacccctcgcttcacttccggccgccattactgggaggtggacgtgggcaccagccaagtgtgggatgtgggcgtgtgcaaggaatctgtgaaccgacaggggaagattgtgctttcttcagaacacggcttcttgactgtgggttgcagagaaggaaaggtctttgctgccagcactgtgcctatgactcctctctgggtgagtccccagttgcacagagtggggattttcctggatgtaggtatgaggtccattgccttttacaatgttagtgatgggtgccatatctacacattcatcgagattcctgtttgcgagccctggcgtccattttttgctcataaacgtggaagtcaagatgatcagagcatcctgagtatctgttctgtgatcaatccatccgctgccagtgccccagtttcttctgagggaaagtaaataaacatttgaacataatcatctttaggaagtttcagtgctcccatagccatagctaagaacttttccgctagatacacataggtacaaagggacagaagggaaagagccatcactctgtaaaccatgaacagaaagcaattatattaatgaggggaaaattacattgtacttaaagtttgtcatgttgttttctttggggcttatgtttatatttctgttcaataaatattttgaaaattcagattcatttgccaatcttttctattttctgcaagattagtttactatgtgttatggaagttatgaacgaaataataatttgaatgtgacccaacacagtaactgaatttcaaatgataaggacctatgaatacggcaaaattatatatgttcatgtattcagtttaacccaataactgaacactgacattcatttcaagtgcacactgagtgtttgccacgaatatgtgtggtcttagagagaactcgttagctttaaaattgaaatacaatacaccctctcctatgacggcaacagagtcaaattggaaatcaataacaggaagaaatccataaattctccacatatatgcaaattaaataaccacttctaaataaaatgatcaaatatgaaattacaatggaaattacagctatcctgagttgaatgaaaagcacacatttacaaaatttctagatgcggttgaagctcagtgagaaactcataataggaagaaaatatcgtaatcaatcaccttaatttctacttgaacttacttcactaagagcaattcaattgtcagcattttgatcaaaaccatctgacaagtatctgggaagttccagacattctcacatcttcctgtcttcttctgagccctgcaaacggttgcaacctctgcccgttacccagttccaaagtcgcttccacattttcaggtaccatagtagcagtgcctcactcctggtaccaatattctgtaacagttcattctcacactgctctaaagaactaccggagactgggtaatttatgaagaaaagaggtttcattaatttatagttctgcaggtcgcacggggaacatcactgggtggcctcgggaaatttaacaatcatggaggaaggcagaggggaagcgagtggctttttcacatagtgacaggaaagagagaaagaggaaagtgccatccactttgaaatcatcagatcttgtgagaactcactcacggtcatgggaatagcgtggaggaaatccgtccccgtgatccaatcatctcccacctggtccctcccccaacactgaggatgacaattcaacatgagatttggctggggacacagagccaaaccgtatcacttgatatgatcccacagaatactattcattttcattcagtcttttatttcttaacaaatggtggtaaagtatatataattgaccatcttaaccatttttaagtgtaaaattcaatggtatttatgatgtccatattattttgccaccatcactgccattcatctccagaaatcttttcatcttccaaaattgaaactgtatagccatcctagccctcttttaaattcatctatttgttgtctcgcctgagtgccttatgtattctggatgttaaccccttatcggatgtatggtttgcaaatatcttctcccactgtgtagattgtctcttcaccttattgtttcctttgttgtgcagcagcttttacatgtgatgcgatcccacttgtctctgtttgtttttgttgcctgtgatttaggtggttatatcaaaaaacaagtttgcccagacaaatttcttagatctttccccctgtgttttgatctgataggtttaccatttcaggtctttcatttaactcttttctccgttttgagttgattcatgcatgcagtttgatgtaaagatacaattgccttcttctatatgtggatgagttcttcgagcacaatttattgaaggggctgtactttccccatttcgtattgtggatcctttgtcaaaaatcaatttgccacatgtgcgcgggtttatatgggaggtttcattcctgtttcattggtagaaacggctgtttttattctagtagcatgtcgttttgattatactagttttataatatattttgaaatcaagtagtgtgatgtctacagctgtgagatttttctgcatatgattgttttagctatttggggtcttttgtggcttcacccaaattttaggacttttttctctttttctgtgaaaaatgagaattgtgattgggattgcattgaatgtgcggatccttttgagtgtatagacattttaacaatattaattctaatccgtgaacatgagatatccttttatttgtgtttttgtcaattttgttcattgctattttatactttttattgtacaggtctttctccttctttactgaatttactcttgggtttgattttcttattgttattttaattggaattattattatgatatttggagagagagtctctctctgttttcctggctggagtgcagtgcaacgatctcagctcactgcagactcctgcctcaggcccccaagtagctgagattacaggtagcagtcaccatgcccagctgatttttgtctctttggtagagatagagtttcaccattttggccaggctggtctcgaattcctgaccacaagtgatctgcccactttggcctcccaatatgctgggattacaggtgtgagccaccatacctggcccggaattattttttattttcttttttagatggtttatttacaattcataaaaatgctaagaatttttgtttgttgattttgtgtcttgcaccttcactgaattcatttatcagtcctaacagaatttgttggagtttttagggttttctctatataagatggtgtcatcggcagtgacaatttcacttgccttgaattagattttaataacatttataaaaacaaaaaaggtggaaaaacttctgtcgaatctctgtagtgagttttcatttcagttattttcctttatgcccctcaatttctaattagttcatttttaaaatttctatttggttattgatattttctattttgtgaggtgttactcttctaatttacttcagttctttgtctgttgtttcctttagttcttttggtcctccttcgacaagtaatttagtctgtagagaggaagcccaaggtcttgagcacatttatttcatcttgtgacttgtagacattcggttctctttgtgtgcctcatttattttgttgtaaattggaagtgttctgtggcagatgcagatcagattctcaaagttcacaggttttttattgttatacttgtgggctgtggttttctgtttttgttttgttttgtttggacttaatgaaagtattttgcaagagttccgttttttctcctctgtggtctcaggtcatcctgactgacacttctcctcacagaacttggtgactagacgacccacgtgagtgcttccttatatcctggacaaaacacagaacctaaggaatcatgaagaaaaaaattcagagccacggttgggcaataacatgacctgcctggttctgagccacctcatccatgtcccggctggactgacggtggggccacgtgctgggcagtggctcagggtgagaccacaatgtccgggttcacctcaaatccgtttgccgtaccaacactgacaatgagagaaaggatgacagtttcctttggaaactgagccaagccctgggttgtgagaaactctgagcttctcttcattgttaaagaagaaaatgtggcacatctacaccatggaatactatgcagccataaaaaaggatgactttatgttttctgcagggacgtggatgaagctggaaaccatgattctcagcaaactatcacaagattggaaaaccaaacacggcatgttctcactcataagtaggagctgaacaatgagaacacatgggcacagggagaggaacatcacacactgggacctgtcggggggcggggggttaggggagggatagcattagggagaaatatctaatgcaggtgatgggttgatgggtgcagcaagcccacatggcacatctatacctatgtaccaaacctgcacgttctgcacatgtaccccagaacttaaagtataattaaaaaaaaagaaaaagaaaagtctgcttgtacagtgaacagggcctggggatcggaagccaccgaagccaaccatttacgtctgcttctgtgacacacctgcagggacggggcatggagaatacagccctcgctgactgggatgttgaaggacaggtttattcaaacacagaaaaccctcaaagtactgaactgtacatgagagcgggcaaggaaactttaccactgtctgaatagaagccagcggagctgctttctgtgaaaagatgcaattggaaaagatgtggaaagtatctaacagccaaaccaaccccaccagtgtgccagcaatcctaagacgctattctctaattctaaacggaagaactcctctcccaagacatgagcatgaatgcaattccaggctgtaagatattttgggagaatattagagaggcaaatcaacccactgggctcggtgctttccacaactgaggccacctggtattcccaaagagaacataaattttgttcaagctttacggaaagcagataaaaattaaaagatgtgagggatcagtgctccaggaacatgggcccataaaattacaagctggagaataactgctcccagaaatgtgagtatattttaaaaggatttatatgagaaaataaagcaattagaattatgcaagaagagataagcattttctccctgcatgcatatgtgtagatacggtatgtgtgtatacatggacatacatgtggcagattatattataggtcccaatcaatgaagaaatgcagtgtgcaaggatttcatctaatatatgcaccacaacgtagagatttgtgtttctccatttgccttcatgagacaaaaggaattgagaactgccttggctttgaataggaaagaagagaatctagcaatcgctagagaatgattactgtggagatgattaaattaaagactattaatttaatcacattaatgtaatcaaatcctttcccacctgacctccagtctcccacttttacattcttatccatgaactctgatcacctataatatatttaatacatgaggaacccgtttttgaacatttttaaagaggaaatgaatctcattttacttatgttgtgatgtaagggaaatagattgtaacagtaacttttaactttcattttagatgctgcaactaaaaagaaaaacggactttcactggctgactgattgtctggaaaccgttttgggatttctttcctaagcttcttaattagaatctttacattatagagaaaatgattttgagagttgagtgtggtctgtggagtgtcctattagtaacgacttctgagtaggtttaactcacctcttttattgaaatgtgaaaaggtgtgacatttataatagaaaactctttgaaagtcgcaccgttcattttagaggaattttaaatgtcaccccaaattttacgattttaattaattttaattaatttccaaattttaaccaataggcataatattcaagatcttatctaaaaattattacatggcaatattttgtccttgttaattaaaaaataacactgaaaacacagtcgtcttcctttacggtaaaaacctgtccaatagtaacaatctcaatgatggcagaatgaaatcagaatctgattagattaaaaaggagggaaagggtgtggctaaggtgggtggagagaccctctcgtataaaagcccatggcaggcagctctcactccagatctgagctgtccgcagaagcagctggaggccaggggagaaactccagaaggagaggtgagttcaatcttatggaattcatttttacaaaaggcgtatgagaatctaggggaatgcaataatgtcttgattccacaagtgttgtctgaggccaactccatgacagacacactgtatttctggaggatattgggacctctgccctggtaacggttaggcaactcttagattttcaataccaaggcaagagacttgacaatctccatttgcttgaatttcatcagaatttggtagactttctgaaatgatggacagaggttcggtggctgcgttactcaacgtcaggttttcctatgggtttggtattgttttcctattctccccttcccacaacccctggcaaccatcattcttctcttattttctgattttttttttgttcagttttttgttccttttaattcagaaggagaaagggaaggaaatgaaaagcaacgtttgtttaaattactattgtggaaaagatctggccagatgctgggacccacctcttccaggatggggattcattatttctttaattgttttgagacagggtctcgctctgtctgccaggctggagtgcagtggctattttctgattctatgagatcagtcaactcagattccacataactgagatcatacagtgtttacttccctcagcctcacttatttcacttcccatcatgccctcggccttcatccacattggtgcaatgccagaattgccttcttttttatggtagaataatccaatgtatatatcaccatttcctcatctatttttctctcacagacgctggggttgtttccatggctgttgtgaataatgctgcagagaacctaagagtgcagatatctctttgatatgctgacctctttctttcacatagaaacacagaagtagggttgctggaacacaggcagttctattcttcatgttttcagaaacctccctactattttctgtagtggttgtaccaattttctttcccaccaaccgtgcacaagggttcccctttctccacatccttaccaacacttatcttttgtctttttgatcatagccatcctagcagagagggggtaatatctcatcgcggttttattgctggagggctcaggaggctctctggatgccagagagaacccagtcccagccagtttccaggttctggatgctgtcgggagaacgaattcagggatgagccagaatgaagtgaaaggcaagaagtttctattccagagcaaaagcacactgttaggagagaagtgtgggcgtgattctgaaagctggtggcgttcaaaggagtttggggtttctatttttgtcagtccttctaattaggaggtgaactaatcattaggttttgtaggaaaaaagcagagattttttagaattggtgaggtacccatttttgtactacatatgggcatgctggggtcagccgtgacactgcagagtgtgtgatttagtgtggtaatgaccacggtcattactgtggcaatgctttgaaacagcttaactccctccggttttttagcacctcatgagcccaggttcctccttgtccttgtaattttaatgacaagtggctaattttaaaagccactgttttggtctcatgtgaaattgtcactggatacgttctcgattctcttgcgaccacacagtattcctgcctcagtttaaattgcatttctcagatggtgagtgaggttgagcttgttcctcagtacttgctggtcgttggtgtgtgcttttcagagaaatgtctattcaggattctgcccattggaatttggattattttggcttttttttctttttgctacggccttgaaaatattccttatatattttggatattaatccattgtcatatatatggctgcttgtttggtttcttttagttctgttttttgtttttttttttttttttttccgctatgcagaagattcagttttacctggtacgacttatttgtattttgtgtcttgtccttttggtgtgctatcagggttttcaccacatgcagtttgcacagttggggaagtagaaggtcttcaaatggactccagcactgtccaatagaatcttaagataacccatatatgtaattgtaaattcattttctggtagtcacataaaatagaacaaaacaagcctaatgaattttaactcagaatataatcatttaagatgtgagcaacttgaaaccttctcaagcagatagtttacattctcttttccccattacgtcttcacaaagaggagtgtatttggctcacagcacatctccattcagatacgccccatttcaggtctcaatagccatttgtcactggtggctaccatatgaaacagcccaggtgtagactcctttactatttcaactcaaagtctttcggtgaatcatgccctttattccaatgagtattacagatattagaagttcagggcctcgagtcattgacatttgtattcatgttgtgtcttcatcactagcagtagtgatttaaagtatggtgccatgatagctccatgcatgtaaagataaaagccccaaacactatcagctgttcattcagctcgtggaaattctaattccgtgttcatttttttttctacagacatttgccatggctgagcacttcaaacagatcattagatgtcctgtctgtctaaaagatcttgaagaagccgtgcaactgaaatgtggatatgcctgctgcctccagtgcctcaattcactccagaaggagcccgatggggaaggtttactgtgccgtttctgctctgtggtctctcagaaggatgacatcaagcccaagtacaagctgagggcgctggtttccatcatcaaggaactagagcccaagctgaaatctgttctaacaatgaacccaaggatgaggaagtttcaaggtaaggaatctataggacctgccacaacccataaaaggcactgggaaaacgactttcaaacatttcttcattaaacataggcattagcaggatatctagcatctaaaacttccatgcttcacaaacaacagcagttctcacctttgcgtagagattttcatggaatctgtgcaagtttgtagaatactttggagagcaagctactgtcttctttcatgtatcatatgtgctaaatggaaaactaattttcatcaaattatccactaacttatttcgaaaggcatttctaatatgaataaggtggacttgttacaatgatcatattcatgcaacctatagatacaatttaacctcatcaggtggccaaacaagtttccccaggaaattttgatttgggaaagaaagtagaataaaagtaaaagtgaataatgtgtttaagtgtttgcagtcaaagggcagagggagtctgtagtgtgtgtctttgctgaactcctggttcttctttgcacagtggatatgaccttcgatgtggacacagccaacaactatctcatcatttctgaagacctgaggagtttccgaagtggggatttgagccagaataggaaggagcaagctgagaggttcgacactgccctgtgcgtcctgggcacccctcgcttcacttccggccgccattactgggaggtggacgtgggcaccagccaagtgtgggatgtgggcgtgtgcaaggaatctgtcaaccgacaggggaagattgagctttcttcagaacacggcttcttgactgtgggttgcagagaaggaaaggtctttgctgccagcactgtgcctatgactcctctctgggtgagtccccagttgcacagagtggggattttcctggatgtaggtatgaggtccattgccttttacaatgttagtgatgggtgccatatcaacacattcatcgagattcctgtttgcgagccctggcgtccattttttgctcataaacgtggaagtcaagatgatcagagcatcctgagtatctgttctgtgatcaatccatccactgccagtgccccagtttcttctgagggaaagtaaataaacatttgaacataatcatctttaggaagtttcagtgcccccatagccatagctaagaacttttccgctagatacacataggtacaaagggacagaagggaaagagccatcactctgtaaaccatgaacagaaagcaattatattaatgaggggaaaattacattgtacttaaagtttgtcatgttgttttctttggggcttatgtttatatttctgttcaataaatattttgaaaattcagattcatttgccaatcttttctatttgctgcaagattagtgtactgtgtgttatggaagttatgaacgaaataataatttgaatgtgacccaacacagtaactgaatttcaaatgataaggacctatgaatacggcaaaattatatatgttcatgtattcagtttaacccaataactgaacactgacattcatttcaagtgcacactgagtgtttgccacgaatatgtgtggtcttagagagaactcgttagctttaaaattgaaatacaatacaccctctcctatgacggcaacagagtcaaattggaaatcaataacaggaagaaatccataaattctccacatatatgcaaattaaataaccacttctaaataaaatgatcaaatatgaaattacaatggaaattacagctatcctgagttgaatgaaaagcacacatttacaaaatttctagatgcggttgaagctcagtgagaaactcataataggaagaaaatatcgtaatcaatcaccttaatttctacttgaacttacttcactaagagcaattcaattgtcagcattttgatcaaaaccatctgacaagtatctgggaagttgcagacattctcacatcttcctgtcttcttctgagccctgcaaacggttgcaacctctgcccgttacccagttccaaagtcgcttccacattttcaggtaccatagtagcagtgcctcactcctggtaccaatattctgtaacagttcattctcacactgctctaaagaactaccggagactgggtaatttatgaagaaaagaggtttcattaatttatagttctgcaggtcgcacggggaacatcactgggtggcctcgggaaatttaacaatcatggaggaaggcagaggggaagcgagtggctttttcacatagtgacaggaaagagagaaagaggaaagtgccatacactttgaaatcatcagatctttgagaactcactcacggtcatgggaatagcgcggaggaaatccgtccccgtgatccaatcatctcccacctggtccctcccccaacactgaggatgacaattcaacatgaggtttggctggggacacagagccaaaccgtatcacttgatatgatcccacagaatactattcattttcattcagtcttttatttcttaacaaatggtggtaaagtatatataattgaccatcttaaccatttttaagtgtaaaattcaatggtatttatgatgtccatattattttgccaccatcactgccattcatctccagaaatcttttcatcttccaaaattgaaactatatacccatcctagcccactttttaattcacctatttgttgtcttgcctgagtgccttatgtattctggatattaaccccttatcggatgtatggtttgcaaatatcttctcccactgtgtagattgtctcttcaacttattgtttcctttgttgtgcagcagcttttacatgtgatgcgatcccacttgtctatgtttgcttttgttgcctgtgatttaggtggttatatcaaaaaacaagtttgcccagacaaatttcttagatctttccccctgtgttttgatctgatagttttaccatttcaggtctttcatttacaatcaccattttaattccactctctaattttatgacttcagtgtttttaggttcctagtaagttaggtcattcggtatttatcgctttctatatgacttattccacttagcaaaatgccctcaagtttcatccatttttttatggtgtacgatatttcattgtatatatagcacaatttcttgatctattcttctgccaacattatcgagtaaaagggattcgctgtccaatactctaggagtgaataggatgacatggggatgtttgagaaaaggaaagcattgcattgaaatgaaaaccctagggagacaggagtccagctctaatctgtcgtctcatactggcttcatgtcagcatttattagaaaaggttcagagggcctggcatggtgtctcatgcctaaaatcccagcaatttgggaggcagatgcaggtggatcacttgagctcaggagtaggagaccagcctgggcaacgcagtgagacccccccctctccaaaaccacaaaaatgagctgcacatggtggtgcaggcctgtagttccagctactcggggaggctgaggcaggaggatcatctgagcccgggagtttcaggctgcagtgagccgagatcgaaccactgcactccagcctgggtgattaaaaaaggttcaggggatggattctgagatcagtaagtaattgatggaaggaaaagggaggtctggaaagtccatgggcatgggcagttatcttttcgtgctttcttgtgggtcgactgtggaaattcaaagggtgttaatgtacaacatgcagtggaaattcgggctgtgacttcagcaagcttgttctgcacagactccagctggccacattggctctagccaatttcagccagttcttttgtttcctgaacagagggagtttcagtgtttcagcaaagttgtttcttttctttgttttctttttctttttttggggggagacagggtcttgctgctgcctgggctggatgcagtggtgcgatcttggctcactgcagcctctatctcctgggctcacgtgatcctcccgtatcagcctcccgagtagctgggaccacaggtatgggccaccacacccggctaatttttaaaattatttgtagacacgggtctcacgatgttgcgctggctggtctcgaactcctgggcccaaacgatcctcctttctcagcctcagaaagtgctggaatttacaagtgtgagccaccgcgaccagccaagttttttcccttcttacctgccatgctgtacactcaaaaatttgttagttactggtttaactcttttatttttatttatttattgttttagacgaagtctcgctctgtcaccaggctggggtgcagtggcatgatctcgcctttgcccatttcataatcagaatgttagttttaggggttttttttttctattgcgttatgagttctttatatattttggatattaacctaatatcagatatataatttgcaaacatttttttccattctgtaggctttcttttcatcgtctcccttgtttccttcactatgcagaacattttttgtttgacatagtccaacttatttatttttgttttttgtgtaatataatgctgtaagtttcatgccacatccaggtggaacaaatactatgccacgggagtttttgagaaaagaaaagctttatgttaattcaactcccagggagacaggagtccagctctaatctgtcgtctcatactggcttcaaatcaccatttattagaaaaggttcagaggacctggcatggtggcacctgcctgaaatcccagcactttgggcggctgaggcaggtggatcatttgaggtcagtagtaggagatcagcctgggcaacatagtgagacctcatctctccaaaacacaaaaattggccaggcttattgtggaggttgagggtctccagtgctgtccaatataaacataatgtgatcaacatatgtaagataaatttattgtctaatagccacataaatcaagcaaaatgaaataagcctaagtaagtttaacaaaatataagcatttcacatgtaatacatttttaagattctctaacagatagtttacatctcccttaggtcttcaaaatttagtgtatattttatactcacaacacatcttcatttagataagccccatttcaggtgctcagtagccacatgtggctggtggctaccatattggatagctcagctgtagacccttttgccactcaactcaaagcctcataccaagccatggccttcattctagccagtatttccaatattggaaggtcagggccctgatcatttatatttgtacttatattgtatcttcatttcctagtaccagtgctttacaaagagtaggcgatgatgtcttcatgcaggtaaagatgaaagtgtcccaagaactatcagccattccactcacgtaaaagctaataccatgcctatttactcccagacagtggccatggctgaacactttaaacaagcaagcagttgtcctatctgcctggattatcttgaaaaccccacgcacctgaaatgtggatacatctgttgcctccgatgcatgaactcactgcgaaaggggcccgatgggaagggggtgctgtgccctttctgccctgtggtctctcagaaaaatgacatcaggcccgctgcccagctgggggcgctggtgtccaagatcaaggaactagagcccaaggtgagagctgttctgcagatgaatccaaggatgagaaagttccaaggtaaggaatctgtactacctgctccaagcccataaagggccttggaaaaagcagcttttaaatgtctttccgttcaatacgggcattagctgaagtctgcaacctaaaagatttgtgatcccaaacatcagctgttatcagcgcacagtatagattttcacaggatctgtaccaatttatgagagcaaactatcatctcctccttcatccatcctatgcaccaagagggagaaaaacctttaatcaaaatattgaataacttaaacaagaattttactatgagaaaggtgggcttgttgcaattatattcatacattctatacataaaatttgacttaatcggggggccagggaaattcctaaagaaagttcggatctgagaatgaacgtggaataaaagaagtgacaatgaataaaatatttgggtctgtgcagtagaaaggcagagggagtctgtagtgtgtgtctttgctgaactaccggttcttctttgcacagtggatatgaccttggatgtggacacagccaacaacgatctcatcgtttctgaagacctgaggcgtgtccgatgtgggaatttcagacagaataggaaggagcaagctgagaggttcgacactgccctgtgcgtcctgggcacccctcgcttcacttccggccgccattactgggaggtgggcgtgggcaccagccaagtgtgggatgtgggcgtgtgcaaggaatctgtgaaccgacaggggaacgttgtactctcttcagaactcggcttctggactgtgggtttgagacaaggacagatctactttgccagcactaagcctgtgacgggtctctgggtgagctcaggtctacaccgagtggggatttacctggatataaaaacgagggccatttccttctataatgtcagtgataggtcacatatcttcacattcacgaaaatttctgctactgagccactgcgcccatgttttgctcatgcagatacaagtcgtgatgatcacggatacttgagtgtgtgtgtgtaattaataatggcattgccagttccccaatttatcctgggcaaggcaactatacacttgaacacagaaaacatccacagtaagtggctgtgtgctcgtgaccaaaggcgagaacttctccgcttggtccacttatggttcaaagttatggaagaagaatgtgggtctttcaaggaattctgagctctacttgtattgctgatgaaaaattgcatatgaaatataaagcagtgtcattttttggtaactcatgcttatgtttctttcacaataaacgtttaacattttcagatgaatttgcaaatgtttttcttttgctttgctgtaagatcaagtaaatgtgttatggaggttataaactataataatataaattgacccccaaaattaattcacttactaaatgacaaggaaacactgcctgttaaactgataaaagtatctgcctgtatttgttcagttttacccaacaactggaaaacacacattcatctccagtatacattgaacattcgctagcatagacagatgtggccataagacaaatcacattgacatgaaaattgaaataatatacacgctgttctcaaatgccaacagaattaaattataaatcagtaacaagaagaaatctgtaaaatctccacatacatgaaaattaaacaaccactttaaaataaaacacaaatcaaaggtgaacttataaaggaaattataaaataccttacactgagtgaaagtaaatgcacaatatcacaaaatgtgcagatgtagttgaggtttagagggaaatttatagaaa[175 bp omitted]gcctcccaagtagctgggaccacaggcgcccgccactacgtctggt[138 bp omitted]cccggccggtctagcttccatttttaagtgagcaaatgcagtggcaaattaggtaaaaaacaaaacaaaacaaagactacagtagtagtcaatgaaatagaaaatggataaatgttaaataaaattttaaaaattcaagacacgttttttcaggatcaaagtagtaaatcttcagctacagtgaaggagtgaggaaggggtgaattaaaacaatgagtaagcaagagaaaaggaagacagggcaaaatcaagagaggcagagaaagaagagacagagcccatcgtgatggctcaagcctgtaatcccagcacttcgggaggccgagaagggaggattgcttggactcaggagtttgagaccagcctaggcaacaaagcaaaaccccatctctacaaaaataataataaaaaaattagctgggtgtgttggtttgcacctgtggtttcagccacttaggaggctgaggtgggaggattgcttgagccccaggaagttgaggctgcagggagccatgagccatgatcatgccactgcactccagcctgggctacagagtgagaccctatcttcaaaaacagaaaagaaaatgtaacatatatacacaatggaatagtattatccatagaaaagaagaaagttctgtcatttgcatctacagaaatgaacctggaatacactatgcttagtgaaacatacagccacagaaagagagatatcacgtgatctcattcacttggagaatttta[206 bp omitted]gctgaggcaagagaatcgcttgaacccgggaggtggaggttacagtgagctgagattgcaccattgcactccagcctggggtacagagtgaaattccgtctcaaaaaaagaaggaaaaaaaagaactagagagcaaaatggggttaccaggggccggggctggggctggggctggggctggggcagtgaggtgggagggttagggaatggttggccaagatacacacaatttcagctagacaggagaaataaatacaacatggcaacaatagttaataataatattcttgaaaaatgctaagggaggcaattttcagtgttttcataaaaaacatgacaacttttcgaggaaatgcatatattacctaactagatttacccgtttggtaacgcatctacattgcaaaacaccatgacatacacaatcattacatacaattattctgataatttaaacaaaacaagaatcaaactttacatgctcaagatgttccgttttacctcagtgagatctcaaaaaaattttttaataaaaaatagttctgttgaaactctcttgtgaattttcctttcagttgttgtactttattgcccctaaattgctcactggttccttcttaaactttctctttattcatgttctctatttgatgaggagttattcctctggtttatttttgttcttctgcccttgattttcttgagttctttgcacatatttaagataattaatttagtatttggagaggaagcccaatgtcttggcttgctcatatgctattttttcttacgactattatactgtcttgtgtgtgtgcctcattgttttggtaagaaaaagtggacactgtgtgtggcaaaccctggacatcaaattctcacccctgagcaggctttcttgttgctgctggttgtgagttggagtcttctgtttttgttttcattttttgttttgtttgaacctttgtaaactactgtgtaaaggtttcactttctcctgtgtggccactgaagtctctgccttctggtctactaacaatttgatggagatttttaaaacatgcctgaacgcaaacccaaaattctctcaagctctttgccatgggatccctctagggagcttagccaggattttgatttttttttttttttttagacggagtctagctctgtcgcccaggctggagggcagtggcgcgatctcggctcactgcaacctccacctcccaggttcactagccaggatttttacaactctcatttcagccttcatttcctgcttgcatggagcctcgggatcatcagaggtaaaacatagggtttctcagatttttataatcttgcatggacatgtatgattgaactcaatccttggtatacctcagtgctattcaaagcccttactatctcatgtaattctccccccagactcttccttaataggcttttcattctgtcatctgttttccctgttatccctcacccaggcaacttcagcaagtgtatttgtctttaagtgcttttaatgacactggcaccccccaataaatcagcttcagtctgtgtagatctaaaaagggtgaaataaaggcaagcccttgagccaacccttcaaggaaccactaagatagatggaggcacacaaccacaattctttgagaacaaagattcttcatcctgtggcatcagcgtgctggcctgggaatgagggactccatgttctcagcagccatcaagctgcagagtggggaagagtaggtgggtgagtcaaattaccacaactcagctgggtgcagtggctcacgcctgtaatccccgcgctttaggaggccgaaacgggcggatcaccaggtcaggagatccagaccaccctggccaacatggtgaaaccccatctccactaaagatacaaaaattagctgggcgtggtggtgggtgcctgtaatcccagctactcgggaggctgaggcaggagaatcgcttgaacccggaagaaggggcttgcagtgagtcgagatcatgccactgcactctggcctggtgatagaacaagattccacaaaaaaaaaaaaaaaaaaaaagccacaactctcttcctgaaattaagcagcttcttccttcactcacggttcccctggaggttgtaaattattagattcaaattttccacaaaggctgattttgacagttatttcccagtttaatttttgttttaccaaagactacttttaaaattccctaccttgaaacttgcagtgagatcactccattaattttaaacagaattttaaaattctgatattattgctctatatgctctaaatagggcttttgtctatttgtaggaatgcttcctctcagtgcaaattatctagaataaagaagggaagtctgtttctccaaggagaggcacaggaggcagggctatataggtaacctggatgacaaattacaatatgccatggagtatgtggacattgaagatatgcaatattgaggtgggaagatggcttcaatgacttcagaattttcagtcatgggaaaacaagaggtttccttaaattgtgatagcctggccgggtgcagtggctcacacctgtaatcccagcactttcagaggctgagttggacggatcactcaagaccagcctaggcaatatggtgagaccccttctctactaaaagtacaaaaaattaggggggtatggttgcatgcatctgtggtctcagctactggggaggttgaggtgggagaatcacttgagctcaggaagtcgaggctgcagtgagttgtgatcgtgccactgcatgccagcctgggcgacagagtgagatcctgtctcaaaaaaaaattatcttattttagaaacatgtcagaaaaatcaaagaacaagcccagttgaaactacagtaagatcctttgattcaccttcaaggtttctttccacagctgattatgacttgattctgaaatcagagttttgaaaaggaacatagaaaacacttttagccagttattctgctaatcatcagaatcttcacatcatgtccagaagttgcatttatcagaagtggctgaggaggttttgcattgggaatcaaatattctcatcagagaagccccagactcactgaggcaatgtcactgagagatactacagatgacatgatcgtgacatctctgtggggagatcaggtccaggagcctgtctctaactaaggactcaggtgccccagcttatggtgactgacacatccctgtacagagcttgttgccaagaccaccccagtgagtgcttctgtacatttagagcaaaaggcagaacataaagatctcaaacaggagaagagctcagagctgagggtgagcaatagcattgggcaaaataggtttacccctgcctggctctgagccacaccatccatgccccggctggaccaagacagtggcacattaagccaggtgcttggcttgagctcctggctcaatgtgggaccagaaagctcaggtttactgtatacccctgtgtcctagaaacactgtcaaagggagaaattaggacagttctccttagaaactgagccaaggatcacttgaggtcaggcgatccagaccaccctggccaacatggtgaaaccccatttccactaaaaatacaaaaattagctgggcatggtggtgggcgcctgtagtcccagctactcaggaggctgaggcaggagaatcacttgaacccgggaggcagaaggctgcagtgagctgagatcacaccactgcactccagcctgggcagcagagcgagactccatctcaaacaaaaaaaaaaaaatttttttttcagcacgtaaagaccctaaaacctacccaccttgagtaggtatcctctcacctatggaggcctattaggtacagcaaccagatgcttagcaatggggcattgtaaatacagtgtcagggttggaaacattatcagaggatgcccagttcaactccctcttctgaaagaaggtgaaaaggagacgctttttctgaggccacacatatctgacatttctccacagcttagagaagtcacccttcatcccatggaacacacacaagtttgtgagcggagctggctaagagcaggggagatacggaaatgaatgccagttacggtgttaggtagatccgggaagaacatggtgcagcaggaatacgaagtcaggagggaaggtgagatgaggatttcatttcgaaggattcctagggacaccttctaacaactctccctagaccaaaacaaaaacaaaaacaaaaacaaaaacaaaacccagaaaaacaaaaacaagaaacaaaccatgaaaggatcatagtttctttagtgttactccaccgtgcccactgatgaaacaatcatgcttcacagctttttccaatgcattttatcctttattacttcatataatccttttaatactcttgagacagtgtaggaatttgaagtggttgactggatcaaggtcacacacacacacacacacacacacacacacacacacacacacacatcaaataggaaaattatagtcctaattctcttgcatcccagtcacggtagtaatttataataaatactgtttacgtacaacatgatcaaaggggttgcctagatgctgtatttgacgttctcatggctgcagacattctgggaaatttgaaaaacatgtaatccaaattagaattaggtattattgaacctggctgagaagcaggtgtcacaccaatttctctgccttcctttaaagaccaagtttcagacagaaagatcaaactgggttttctttcctttacagtcatcagcaactgctgggtttgtgtgttcaggccagttaatggaagcctgaaggaaaacagagagagaacgccgttaatgctacatgtgaggtctcagctttgttgcatcaatgactaattccccatatggcatcctttgggtattcttgggagtatctcaagccatctctgaggaaacaaaaatctgttccagactgaaaaccgtgagatagcgatttctccattaaatattagaatgtaagacaagatttccactgggagaactgtttgaagtaatattagtagtaaccaacgccactacgtgctcaatgctttacatgcatctcacattacatcctcacaatgggtaatggcattcaagactttataggttccaatactgagggtcaaagtttccaactaaaatatgtttacaggctggacgcagtccagtcccacgtctaatcccagcactttgggaggctgaggcaggcagatcacttgagctcaggagtttgagaccagcctggacaacatgccaaaaccccatctctaccaaagatacaaaaacttagccgggtgtggtggtgcgtgcctgtggtcccagctatttgggaggctgaggtggattacttgcacctgggaggtcaaggctgcagtgagccatgatcacaccactgctctccagcctgagtgacagagcaagaccctaactagaaaaaaaaaaaatttacatagctagagaacagaggcacacttacaccgcagcccatgctcatgtttctttctccaaatcaaagaggaggattcagccacttattttgtgccctctctgcatgtgagtgtcccaattagcatgtaggcacaaatacctttataacctgaaatatggtcatttctgcagtttagttttttttgagcacctataatactgaaggaaaaatatccctggcatcatggagctcatgttctagtggaaggaattagataatagaataaatacattatacatttgaaggtgagaagagccctggggaggaaaaataaagagaataagcaatttggaaaatttgtaatgtttatgggtttttctatgcatctgaaagtttgactcaatatccatatttatgaaaaaattatcacttagagatgacaagggaaaacaactcatagtagggtctccagcatagagtctgtgatctcatttaatctttaagagttctgagataattatcaccattttccatttgagaaaaattggacatgagtgggaaatgagttgcccctcctgtattttattaatgggtcatccggatgcttatacttagtctctaattgaatgctcagtaacctgaatatgattttcctttaaataaggcaggtagaaacagaatgctagatattgccagagctttctacacacgtgacagtgtgaatggaagctgataggcagcttctaaatggcttctaacaatcctcaccttgtatcaatcacactcttgtatcatctttgcctctagcataagcaagacctgtgatttgcttcctttgagatggagtcttgctctgtcacccaggctggagtgcaatggtgcgatctcggctcactgcaaactccgcctcccaggttcaagtgattctcgtgcctcagcctcccgagtagctgggattacaggtatgcatcactacgcccggctaacttttgtatttttagtagaaatgggttttcaccatgttggccaggctggtctcaaacttccgacctcaagtgatccacccgccttagccttccaaagtgctggaattacaggcatgaaccacagcacctggccaaatttgcttctatccaataggcaaatatggtgagatgtcacttttttggtgagcctacatagaattgctacttctgccttgctaacaaactctattgccttgaaaaacctgacaaacagttgctgtttgagagttggagagcaagtcttttcagtgtttcttgctgataactgagggcctcttccagccaacagctctcaaggtactaagacccttagcccaacagcactacaggaactgaattctgccaacaaccacatgatcttagaagcaggctgatttttcctttcccagacataccttcagatttgaccctagccctggatgacatcttggctgcagcctcatgagagatctcaaggacgaccaactaagctgggattggagtcctgacactcacatagactgtaagatagtgtgtcattgaatccaagttggtggtaacatacttggcaacagttaggtaacacagaaaggaagagaacttttgcttttatgagaggaatctaatggatttggaaacatgaaatagactgagaattgcctatttttattctctcgtaatgaggggtacatccaaatggaggaaagaaaatagaaaatattcgtagaaccctttttggtctacgtcaagtataatatcaactgtcatcttttactcaccattgagtacatcctctgctttaagaacgaggcatacattttcaatctcccaagaggaaagactttttttttttttttgtattggaaactggcaagagggtttctcatcatcatcttataggtcctagaccatctcaacacagaattttccccatcacagccaggcgcggtggctcacgcctataatcccagcacttcgggaggccaaggtggacagatcatgaggtcaggagattgagaccaccctggccaacatggtgaaaccccgtctctactaaaaatagaaaaaattagccaggtgtggtggtgggtgcctgtagtcccagctactcaggaggctgaggaaggagaatcgcttgaagctgggaggctgatgttgcaatgagccaagatcacgccactgcactccagcctgggcaacagagtgagactctgtctctcaaaaaaaaaaaaaaaaaaaaaaaaaaaagaattttccccatcaccaaggaaaataagcaacttacccaactaccttaagtacacaatctgggctgatcaagctctcaagaagttttgcaactccatcattgcccaagtgattttgaagcaagttgagtctttctagtgttttgttggtggtaagaacagaggcaagagatcgacagcaggcactggttaacatgcactcttctagcctgcaacgaagatgcacaggtaaggtggggccaaatccttgaggaaaaatggcagatgagatgggtgagaactggacatctactagatccctccaagttttgggcaaaagaactgactgtgcaataagagtcccatttcaaacactagactattatgtccgaggtattgtatttcccaatccacttcctcttgtgcttttcttcagctgttgctagctaaaggcagggatctttctccaccaggcacctacccaatattcaccaacatgcagttgggatgtctcaaaccaccacatagcagctgcattcctgcatcttctattttgttgctcccaatctccaggctcctcagtttttcattagtagcaataactatggcaatatattgacagatatcgctgctaaagaaacagccagacagactgcaaaacagaaacatgagctagagtcatgaccacctgtctccaaagatttatttcacagagtgttaagcattcttggacccgtcttgtgacattcatgaataagggactgcttacagaaacaagagcagtgttaacatctacaggtcacttacaacataccaggcattgttcaaaactcctaatgcacattaaactcacaatgatcacagggctcttatcctggttttacaaacaaggaaactgaggccagaatgttttaagcatttttgtcccgggaagccacatacattcaacctacaccgttgcaatactgagcttggattctgaagaattatgttaggcaacctcctctgacattcacgtttctgcctttcagtactcatgtcaaaatccaacatcgagaagggctaaatacattctttctataaagaggattttaccaaatggtcctttctcaaagcaagcaacgtactcacgattgtccgtgttctcccatgtgacctgccaccttgtttttccattcacgtctcccccattatctactcctacaatcctacttcattgcctcaccacgttggccttcgtgttgattctcgagcacagttggctgtttctctgttaacagctctgcaccgactattcattctgcttgcaagcgccactctagtgatctgtatgactccatccacaaccttctccaagtctttgctcaaatgtccccttgtcaatgaggtgacattgaccttgcttagagatggccataccctaccctcagcactcctgattacgtgcccttaggattgaattaaaaaagtttccatagcagtttttactgcctgatacaggagttgacggcctttctctataaggggccagataatagtttaggcttcaccggccatggtgcctctgtcacaactactcagttttgccactgcagcacaaatgcatgcatgaaacacatgtagatgaatggctgtgttccagtaagatctttataaaaccaggcagagggccagatttggcgcctgggtgatacagtttgctgacctctggtctaacaatacataagtttcttatgttttatttcctatctcccccagtgccaatacaagatccattaatacatggatatttattctgttcactgatgtatcccagccacctagaggagtgcctgacacttaacatatattctttgttatagaatgtatattaaatactgaataatcatattaaagcagattccagaagatcctatttttcatttagtagttataaaagttgggtggtgcattcctgtagtcctagctactcaggaggctgagacagaaggatcacttgagcccagcagtctgagactggcccgggcaatatagcaaaaccctgtcggtaaaatatatagagagttaatgatgtgccaaccacatccatgctttcaaacttagaggaaaataaagggtgatcaataatgtgggcttccatgtgccctatgggagctcatagaggaggtccctatccagctttgggtaggtgatagacaaaatggacagttatacttaagacaattcttgaaggatgacaaaagaacgtgtttggagtctacagcaaggttcaaactatggtctgagagccaaatctagacaactttgttttttatttataaagttttattggaacatagccacacccatttgacatttttcatggcctctcttcagctatgggagacttaaaaatagttatgacagggacattatggcccacaaagcccagagtatttactgtctagcctgttatagaaaaaggtttctaacccctattctacagtatgagtgaatttgtctcaacctactaagtacaaactaagggccatgaaaaaaagggagggtgagttatattattttccccaaggcagctttccctaaactgccttgtcaaaggaagcaagattctagaaagaaaagatatccctacaatttcctattttacctgcccatttgtaccaaattacaatggtaacatggatttaacttataactacaagacagaaataaagataagataccatactgctgagcatattcttatacagtccagtaagcacttcagttcaggagctcacaagccatagtgttgctattttatgaacaggagatgcttttaggttatcagtttcttatatttctgagcccaaaaaaaggcatttgaaatagaacattttcaagagagttcaaattaaacaactccaaggcattttttaaacaatttttttttcaggcaagtgggagaatcactacttctgagaaaatacgagaagtttgattattcagcatcattgatgaggcacactcaaaaaactgtagtggcttgttacatattttttcctggaagttcaatcagaggccattgcatcatgcctaaattagatgtctttggtaggtaccagtggcttggatatggccacctcccccaatgcatcccttttccaataaagctatttcccaacagaaagatgcccccatgatcgccaaccccaaaagatattcactgcctcagaaattgcaagccaggccagggcaggatctttgggtcccttctcctgtggcattttcccatgctatgtccacccggggcagggggaggggtccggcccaggcacccttctccatgtgataaggatctgagggattttgtgaactctgctccttctgagctaaaaggttttgccaatgaatcttaccgtgctttcatgtcgcctattctggggagcccatgctcccgtacccctatcacccatgatgccatcactggaatcttatccctgccaccaaccccaccacccaagccctcatgcagtagaaacacagtcatccaggacaactgtgggagacttactgaagctcctctaactgacaggttggaaacagcaagggaaacgtcacatgcaacactccgtaattttttaagcgattcacacacaggtctagttgtcttagagttgggctgaacagaagcactcttccaagggcgctgcagcaattttcagtgagacagcagaagactaacctgcacacagagaagagtgagtcagtgacagtgtgagcaccagagaggggagcacctgagaccacccaccccacgcccacgggcgcctcgatgccttctactgccattgccccaaatctctaccaatgactttcttatttggaaaaggagattagaagtaccccaaatagtgcagaggctgaaatacagaatggatgatgcagaacagggcatgagaaaaatctaactccaacttctactaacggaataatcttatagacgttacttctggaacttggtttctcccatcgtttgataaagtatatttggctaaattgaatcctaggattttcagtttaaaaactcactttgaaagagttactttattatttataagtgaatacaggaactgttgaagatttttttaaactgggaaaaagtggagacagacggcacaccagaagccctgttgttagcccattttgtggtatcccgttttgtctgtccaggtttagctcgttgccaatatgtggaagtttactcaatcctaatctggatttccagcctctatttttttttccattatttatttttaaataatttttaaaaatagagatgggggtctcactgtgttgcccaggctggtcttgaactcctgggctcaagtgatccgcctgccttggcctcccaaagtgccggaattataggcgtgagccaccacacccggccgaatctctattttttttaacccgttttctgtttgccctgggaatactgcactggcagtgagctgcacttttttcctaaacagggaaggggttaaaaagttggaaataggccgggcacggtggttcacacctgtaatcctggcaccttgggagggggagacaggaagatcacctgagttcaggacttcgagactagcctggtcaacatggtgaaaccccgtctctgctaaaaatacaaaaattagccggcatagtggtgtgcacctgtagtcccaactacttgggaggctgaggcaggagaactgcctgaaccggagaggtggaggttgaagtgagccgagattgcaccactgcactccagcctgggtgactgtctccaaaaaaaaaaaaaaaaaaaaaaaaaaaaaaagttgaaaacaaccaatttattggttggaaatactgaatcttggctctggtatgggaaaagggtacactagaccagaggctggcagcacaccaaacctggcccctccctgcttttgcacagctgcaagcttagaatgatttttgtgctttaaaatgatcggaaaatgtatatgtagttattttaatttgggtttgacacgtgaaatgggctaggttttcctttgtatactaatgcgtgcttattttaaattatatgtacaagtaaaagttaagactaagaatgagctagagaagttccctgttgtcctcgtagaaaccagcactatcaactcatttgcatactattttccagctgtcagatttggtcacgaccataaatttggccttttacaggtgttttcctcagactactgtgatttctttcacgttcttaggcttagaaattccttgcctatttaaaataagttaccaaaacaaatattttttgcttagtatatctggattattttaaatacaggtatgaactacgaaaaactccatgccaacaatctaaggtgataaaaatgttctaaaattatattgtagtgttgtacaactctaaatatgcataaaaaacatcgaatgtgtaccttaagtggatgaattttctgatatgtaaattatacctggaaccagtgggaaaagaaaaaaagaaaaaatctagcaggaaacaaaaaacttgtagatatgagatgaaaaaaatatctatttggagtctgattattgaaccaatggtctgtcccttttttcatgagaccttcttttacaacaaaattagctcatattgacaattacttactggatttatctggggccacatggatcttagaacaatttgagattttaaagacatggc[179 bp omitted]gaggcaggagaatggcgtgaacccgggaggcggagcttgcagtgagccgagatcgcgccaccgcactccagcctgggcaatacagcgagactccgtctcaaaaaaaaaaaataaataaaagcatacataatgcgatattacataatatgaacaggagtttctggtgttatcctgcaatcaaacaagtattttttacagaaaatataaagaatataaagaatattatatcagtttgtattatgttttggaatctagcaagtcctaaaaagggggcgaaaggagctaaagggagccaaaaatgggcgaaacaaaaaaacaagatgacctactgcattcttttgtctttttggaatttggaattgtgaacggggaatcatgtccttaaatacaccgagctacttactgttttgttttctgaccatgttttacagatctccgcccttcatttttgtacctttatgcctcacttttgccacttttttgccatctttcatcgtgtttgccatgccccaaccttccggaagtctgcctttctagccactttcccagagcagacagagcttacctacgagtaacccacagtcggttacatacagggagagcccgtcttccaccttcttgaaaggagactcaggggaaaaaatcctatttcaaggcaatctagcaccaaacctttcctttgctttcgtctttgtgttctcagtcacatctcatcctacacgacacccagttcacgtgttcactgtgagaacaatataggttccctgctcttagaaagtcagttgctatggcctaggtgctgtgtttagaatgttgtgaccaccattttttattttttattttttttgagacagagcctcgctctgtcacccaggctggagtgcagtggcacaatctcggttcactgcaacctccgcctcccgggttcaagcaagtctcttgcctcagcctctcaagcagctgggactacaggtacccgccaccacgcccggctaatttttgtatttttagtagagacagggtttcactgtgttggccaggctggtcttgaactcctgaccttgtgatccgcctgcctcggcctcccaaagtactggaattacaggcgtgagccaccgcgtccggccgtgaccaccatttttaactcttatctccaaagatgtatgtttggtcatgttatgactccactgtccagattgagaaatacaagttgaaaaaaaatccagaaacatttttgccaacgtttcgcaaatcagctgtcaacccagagtattaacccagacctactgaactccaaagactgtgctttcggctgctttgctttgctgtccctttccccaccactgctctttgatcatgtgcttagatattcaagtcagtctgagcttctacgtggtgagctcgtctaagccaacttacaccagtgatataagagtgcagttgggatgaagcaaggcatcacacagtatgttcatcccgtcgctcctcagcggattgctggataaggtcagttttctcagactcccgccactgatgaggagagaggcgatttcttcacattcgctggctcgcaaatcacatttcatcaagctgtaagaggaattcagaaatgaaaagaggctcccgcgtttaagctatcccctcttttaaattaaaaaaaaaaaaaaagagagacctaaccaagtgcgatgatgtctacttggaaataaatagatccctttgcttctaacctttcttctccctatgccactcctcagagttcaaatttgggcaaggttacagattcacgaagggctgtgagcaggcagttccttcctcttttgcattcatctccatgtggtttccagggtgatggttcagaacggtaagtcaggtatcaagcatcccacctgaccatgggatgtgggtacgatcacatttataaatctgatcaagaccctcaacttaccatcacatttacaaggacttctgatgttttttctgcatagccttgggtgccccacatgctctggctctcaactatctctattttctttttttttttgagatggagtcttgctctgtcgcccaggctggagtgcaatggtgcgatctcggctcactgcaacctctgcctcccgggtttttaagcgattctcctgcctcggcctcccgagtagctgggattacaggcatgcgttaccacacccggctaatgtttgtatttttagtagaca[131 bp omitted]cattctgtaccatcctccctgatctcctcactctccctcaagtccacaagcatatttttgctttagtgtctagtacccttatctctacttagtgattttccccatgggaccctattttttaaaaaaagtttttttccttaaattatccaggagtggtggtgcacgactatagtcccagctacttgggagactgaggtgggcggatcacttgaactcaggagttcgaggctgcagtgagctatgatcataccaatgcacttcagcctggacaactgagcaagacgcatctctaaaaaaaaataaataaaataagtagaataaaaataagtgatctttccccagatagctgcatggtttgctgtctcactttcttcaacttgtcactcaatattctcttcttcaatgaggattttgaataataaccatctttcaactaacaaatattgttattttcaggcattgtatgaagttcctgggatacagcagaaaactggaagaaatacgatggaattctagcattgtaaagacagggctgaatgtatcatgtgcctagtagatgatcagttctttatagaaagtaaatcagagtaggtcatagagaaagaaaaggatgtattctacttccttatggggcaggcactgagcgaagactctcactgagccatcgtacttggcctgtgtattctattttgaatgaaatggaagcccttgagggtttgaagattagaggacagaagagtcagaagctctgacttaaataaggtagaagaattttaacagaaacttgagagaagagggcaagctctgaatctctaggacaagggaatttctgtcagaggaaatgagtggaaagagtcagaagcaggagcaggtttggtgttttaaacatctacaacaaacagtgcagccgcagcacggtacataaacaggagatggggagagggttagccagggccacccagcgtgaaatggtgtattctatattattattattttttttttttttgagatggagttttgcccttgtcacccaggctggtggagtgcaatggtgtgatctcggctcaccgcaacctccgcctcccaggttcaagtgattctcctgcctgagactcccgagtagctgggattacaggcatgcgccatcatacttggataattttgcatttttagtagagacgaggtttcgccatgttggtcaggctgtctggaacgccttacctcaggtgatctgcccgcctcggcctcccaaagtgttgggattccaggcgtgagccgtcgcgttggcctgtgtattctatttggaatgaaagtgaaagccgttgagggcctgaagattaaaaggacagagtcacaagatctgacttagattgccattatccttagcaaactaacataaggacagaaaaccaaataccacatgttctcacttacagatgggagctaaatgatgagaacacatggacacatagaggggaacaatacacactggggccgacttgagggctgagattcagaggataggatcagaaaaaataaaaatatctatgaggtactaggcttagtacgtgggtgatgaaataatctgcactaactcccatgacacaagtttacctgtgtaacaaacctgaacacgcatccctgaagctaaaagtaaactaaaaagagttaagtctacccttgtagtaaaactgatatatcaaaaaataaagctatgttttgcttcaaacacacacacacacactcacacacacacacacaccggaaaacaaaacaatccaaactagatgaaagttgcccttctacactcttttccatgtagcaagcaaaggtgtggacaggtaggaagatgctgaagtactgcagataggtgggagatgggttggtctatcatgcttagcagtaaaggaagcaggaaggagtcagatggatccactctaacaacagacctagaaaatttgtctaagccaggccacaagaaaatctgtatttgaaatgcctatttaaatatcaaagtaagaggctgaggtgggcagatcacgtgaggtcaggagtttgagaccagcctagctgacatggcaaaaccctgtctctaccaaaaatataaaagttagctgggtgtggtggtgtacccctgtggtcccagctacttgggagggtgaggcatgaaaattgcttgaacccgggaggcagaggttgaagtgagccgagatcaccccactggactccagcctaggtgacagcaagactttgtctcataaataaatatcaaagttgatatctctacaaatacttcactgagtctgaaaccaggagaaatgtttgtaaataagtacctaagagtcttcatcacatagaggctacttaatgccatgaataagaactcatagaaggggtatagaaaagacatttagaaccacttggaaatatcccaaagataagagtccaggaagatgaaaaacaagtaaagatgactgaggaggaataatcaaggtttgggaaaaaccaaaggccaagaggaaaatgtgttccaagatgaaaggagtttggggaggggggcattgaggtaggggagaggctaactacaaagtggcaacagagttgggatttagctgggagaatgtgatagggagaagggatgctgagtgaggtggaaggcaatgactctcaagaaccatggaatttgaactatgtcagaaagaaagtgaggggctgggtgcagtggcttccagcactttgggaggctgaggtgggtgggagaccagcctggccaacatggtgaaaccccatctctactaaaaacacaaaaattagccatacgtggtggcaagctcttgtaatgccagctactcgggaggctgaggcaggagaatcgcttaaacccgggaggcggaggttttagtgagctgagatcacaccactgcactccagccagggcaaaaagagtgaaactctgtctcaaaacaaaaatgaaaacaaaaacaaaaagaaagggatgaagggggtgaaagggtgggaagctgctgctcaaatggctgaaggacgcagtaggattaaagggtgggaagatttgcttacaagacaaagcagcttgagaatacaggaggtgccgttagagcatgaggtacttgaaattgagagtacaagcgaaatgtacttattggagatgaagtctagcaagtggtattatccaatattgagtcaccagcaagtagagctactgagcactcaaagcgtggctagcatgactgaggcactggattgttagttttactacatttacattggaatttattattcatttatttatttattgagatggagttttgctcttgttgcccaggctggaacgtgcagcggcgccatctcagctcactgcaacatctgcctcctgggttcaagcgattatcttgcttcaccctctcgcatagctgggattacaggcacctgctaccatgcctggctaatttttgtatttttagtagaggtagagtttcactatgttggccaggctggtctcgaactcttgaattcctgacctcaagtgatccacatcctctgcctcccaaagcgctgggattataggcatgagctaccaggcttggctagtttaaatttaaaggttgattccaaattattggaagatttaagtatgtttaggacacgggcatgtgaattagttctctcaattgtaaattttatgaaatcaatacggaggtcaaacatttctgatgaaaatgtgcccgagcggcgatgttctctgtgaaatactgggttctgcagccttttacaaaaaagggaatataaaatcacatcaatagctttttgcattaatgacatatggatataatttgatatgctgggttaaatactgttaaaattagtttcaaggctgggcacagtggctcacacctgtaatctcagcactttgggaggctgaggcctgtggatcacctgaggttgggagtttgagacaagcctgaccaacatggagaaaccctgtctctactaaatatacaaaattagctgggcatggtggcacatacctgaaatcccagctacttgggaggctgaggcaaaagaatcacttgaacctggaagtcagaggttgcggtgagctgagactgtgccactgcactctagcctgggcaacaagggcgaaactccatctcaaaaaaaaaaaaaaaattagtttcacttgcttccttttactttttaatgtggctactggaaaatttcagtttgtggcttgaataatttccactagacagtgttttagggtttgaccagtagtctacttcagaatgaccagaggaattagatcattagagaaatatcagtcaagggagggagaagccatgttatatgaaatatcaatgtagaaattgaaatcaaaaggcaggaataatgttggtgaaagaaacaaaccacgtgctaaaaaaattgaggaatgagtgacatcaaaaggtaggagcaggtagtgttattgaaggggcacctctatccaccaacacccaggcattcccctcacatgcactgagctttcagccgagcaacaactcacctcagatgacttatttggcatgtgggctcgtgcaggatgtcatgcagaagtgaaaacatatttagggaaatggacgtacagttgatactcaggtatgtcaggctccgattacgagccaaagccttgagtaagtcttcaaaaccagaagcagtcgagacataggacaacctgtggaagacataatagcaggaaagcactagtgaaggtctgaacatcttctccacaatttctcctgcctgcctcacttcatcctgtaacaaagattctcagtggattacatcctcacacatggctctcgatcttaaatttctagtcaggtcagaagactattgctaattccaaggtcagcctgttgactttgaagtaatcccctgggtctttatggtgtgttcacctcatgacctttcttaagtgggacccacaagccggatactaagaatacatccacatgcacaaagatattaagatacatccacatgcacaagtttaaccatgtttttctacactgagagcaaaagacaaaatatgctgatggctgataatagccacacaatcaaccacatgtaaattactccgtttcagcagtcccagccagagcaatcaggcaagaggaagaaataaatggcatccaaataggaagagaagaagtcaaactatcactgtttgcagatgacatgattccatatccagaaaaccccatagtctcagccccaaatcttcagctgataaactgcaaaagtttcaggatacaaaaagaaaaaaataaaatcaatgtacaaaaatcactagcattcctatacaccaacgacagccaagctgagagccaaatcggaaatgtaattctatccacaattgctcacaaagaatacctaggaatacagctaaccagagaggtgaaagatcaaaaggagaattacaaaacactgctcaaagagatcagatgacacaaacaaatggaaaaaacattccatgctcatggagagaagaatcaatattgttaaaatggccatactgcccaaagcaatttacagattcaatgctattcctatgaaattaccaatggcattcttcacagaaactagaagaactatttaaagttcatatagaacaaaaaaagagccccaatacccaagacaatcaatcctaagcaaaaagaacaaagctggaggcatcacgctacctgatttccaactatactatagggctatgataaccaaaacagcatggtactggtacaaaaacagacacatagaccaacagaacagaatagagaacccagaaatgaggccacacaactacaaccgtctgatcttcaacaaagctgacaaagacaagcagtggagaaaagactcccttttcaataaatggtgctggggtaactggctagtcatatgcagaagactgaaactgaatgccttcttcacaccacatacaaaaaccaactcaagatggattacagacaaaatgaagtgcaaaactattaaaaacttggaggcgctgggcacagtgactcatgcctgtaatcccagcactttgggagactcagatgggcagatcacaaggtcaggagttcaagaccagcctggccaacatagtgaaaccctgcctctactaaaaacacaaaaattagctgggcgtggtggcgggtgcctgtagtctcaactacttgggaggctgaggcaggagaagcacttgaacctgggaggcggaggttgcagtgagccgagatcatgccactgtactggggaacagagcaagattccgttataaaaacaaaaacaaacaaaacaaaacaaaaactaggcaataccattctggacataggaatgggcaaagatttcatcatgaagataccaagaacaattgcaacaaaagcaaaaaatgacaaatgggaagtaattaaacagaagtgcttctgtacagcaaaagaaactatcagagcaaacagtcaacctgcagaatgggagaaaacctttgcaaacaatgcatctgacaaacgtctaatacccgcatctataaggaacttaaatttacaagaaaaagataacctcattaaaaagtgggcaaagggtataacagacagttttcagaaggtgacatacatgcagacaacaagcatatgaaaacaagctcaatgtcactgatcattagagaaaagcaaatcaaaaccacgagataccatcttacaccagtcagaatggctacgatttaagaatcaaaaaataacaggctgggcgtggaggctcatgcctgtaatcctagcactttgggaggccaaggtgggtggatcacttgaggtcaggagtttgaaaccagtctggccaacatggtgaaaccccgtctctaccaaaaatacaaaaaattagccagcttggtggtgcatgtctgtaatcccagctactcaggaggctgaggcagaacaatcacttgaacctgggaagtggaggttgcagtgagccgagattgtgccactgcaccctagcctgggtgacagagcaagactccacctcgaaaaacaaattatgtatatatatatatgtgtgtgtgtgtataaataaaacagatgctggcaaggatgttcccactgttggtgggagtgtaaattaattcgaccattgcggaaagcagtgtagtgattcctcaaagagctaaaagcagaactaccatttgacccagcaatcccattactgggtatatacccaaaggaatacaagttattctaccaaaaagatacatgcacatgaatgttcaatgcagcactattcacaatagcaaagacatgcaatcaacctaatgcctagcaacaagattggataaacgtgatacatatataccatggaatactatgcagccataaaaaagagagcattttttttttttggcgggggcaggaatatggagttggaggccattatccttagcaaactatcacaggaacagaaccaaatactgcatgttctcgcttgtaagagggagctaaatgatgagaactcatggacctgaagaggagaacaacagacactgaggtgtacttgaggggaggagggagaggatcaggaaaaaataaatgagtactaggcttagtagctgggcgtacagtcttatagtctatatacaaaatatgtacgtcaaacctgtgacacaagtttacctacataaacaaacttgcacatgtaccactgaacctgaagttaaaaaaataacaattcacggctgggtgcggtggctcacccctgtaatctcagcactttgggaggccgagacaggtggatcacgaggtcaagaaatcgagaccatcctggctaacatagtgaaaccctgtttctatttaaaatacaaaaattagccaggcgtggtggcgtgcacctctagtcccagctactcaggaggctgagacagaagaatcgcttgaaccctgcaggtggaggttgcagtgagctgagatcacgcactgcactctagcctgggtgacagagcaagacgctgactcaaaaaataataacaaataattcacaatttcattgaggaaaaagaagttgtcctagagtcccaccaccaccaccggccctcacccccaaccccggaagaacatttctcattactcccttggagttgcagcaggacatcagggcaacagctttggtcattgtctctaagggccacctagagaaaagagttaggaatctccaactcaacattaaaggaaagagacgggaagggaaatgtggaagctggccaacccttggaggattgaggatcctatggcaaatccaggcatagaacacacgggaagcccttttaatttacttcccagcctatgtggcgactcggtgggagactggatgttttccatgttgccgtattttcagagtcctttacctagcaattctcctgatccccattttacacaaacaacttctctcccaagtctttgccccatgttgcaacaaaactgtttaaggttttgtttttttttttaaatacacacaatggagtctcactctgtcacccaggctggagtgcagtgccacaatctcagctcaccgtggcctgcgcctcccgggtttaagcgattctcctgcctcagcctcccaagtagctgggattacagttgcatgccgccacacccggctaatttttgtgtttttagtagagatggggtttcaccatgttggccaggctggtctcgaactcccaacctcaagtgatccacccgcctcagcctctcaaagtgctgggattacaggcatgagccactgcacccgccctaaaagtcttcagttctcctttcatcattttcaattaggcttttctgctctcactacccttccagaactgttcttggccaacaatgacttctaccttgctaatgtcattggccaattctcagtcttcagtctccttgaataaggactgccatctgacacagttgacctttccttcgttgggaaacttgcctcactgggatccgaggataccacaccctttactttaccttctagcctaatgaccactccctcaaaggccttcgctagtttctgcttttctccccaatcactttatgttggagaactccgggcatcagtctttggatcgttttgcttcctgagcaacattcctatccttggtgaactcagtccttggctttaaatacacatttgtgttatacacatgtatacatgaacgacacccacattttaccttcagttcagaaacattacacactgctctctggacacctaatagacatcacagctttagctcaaacaactttagactgaccttcctcagattctggctctcgccgtcatttcccaactcagtggcaactctcacatggcagttttcaaaacaaagatcttgggacaattctctctcctagtctagatttaatcaaggaatcatcctttgtcaacatatgccccggagttcgcacctcaccaacctctactattcacaccctcagaggcaccattgattctcacctggcaaatgccaagaaaaagagcctcctctgagctttcagattctgccctatgctccccgattggccatttttaaacgcggtatccagaatgagcttcttaaaatgcaagctaaattatggcatctctgctcaaaacccctcaaaatgcctcacctcactccagaaaacccagtcctgacactggtttacaacaccatgatcatgccatacatacttgtgagccatctccgtaatacccttcctgcctcacactggtctaaacatgtaggtctctgaactcaaagcctttgtttcatggatccctcccatcccaggggatgaccaacagtttatctggctcattctttcacctcattcaagtctttgctcaaatctcactttctctgtggaacttattactacagcctgtaccctcccacacccctaaatacccacttatgcaccctgaccttgccattcttttccccccgtaacaccattatcctaaaatactttaaaatgcgtgtacttattatgtctgcctatattctgtctcatcagatagcaaacaaggaaatttgtcttttttccccccattgatatatcctagtgcttagactagcacctcaaacaaagtaggcattcttcttgaatgaaaataaagttaactcctgggcttccagaatcctaagatcatatatgttgatgtgtactgaatattttagtgccatttcctatagagctattataaactcagataaatactaattttcccagtgactgtttaggcaagtacagctgcttttcacctgattctaacgcattctgtaggaaagaaactgttagactcctaccctgacccatttttgctttcttccttaggataaacccacttgttactatttcttcctgattccaagagactactttcccagtccccctttgtagttatatgaagccgtatgaagacaaggtaaacaggccaatgagatgcaagcagaagtgatacaagaaagagttttgaaaagactccatcaaggaagctcctgaagcttctagataaacctttccttctcccttctgttgcttcctgccttgaaggcagccatgatggctgggacctcagatgctactgtggcctaaggtcatctttatcatagacacactaaagatggttgagaagtacagaaggagcctaggccctgatgagcctgacctgaaagtgtgttttgtatattgtcttctcccagagaaagaaaaagaccaccgttattcctaggggaacctctaaggcagaggttgatatagtacttacttgagtgtgcgaagtttacagctagaatgctccagggctttagacagaatcctttctgaaataccattaaggtcattgtcaaagatatgcagctcccggaggctctccattgtataaaaaagagagcagatctctctccagtagacaaggctcttcatttgactacatagaagaaaaattgagttttccaatggaatcgattcaactccagcaatttgtaaaacatgtaaattaaagtatgttttgagagtgcctgttgtctgactcagatttaataccatgcagcaagaaataaagtagggtcaaacatgaatgaacaacactcagatccattaaagtagctggtgattccatattctgataagacacatctgagtgcagggcctttaaatgcgagattattaaatatttttaaacttcaatattaaaaatcaatgttgcatgttttgtgctatcatgaatactcctataatgtaacaatacaaggtttatttctttttaatctatacaacagatctgaagaaattaggttaaaccactggtttgcaatgaggcaattctgccgctaagcagacatttggtgatgtataagatttttgttgctgtcacaaacggggaaaaggggaccctactggccacaggagagaccagagatactgctaaacctcttacaatgtgcaagatagacccccaccacaaagaatagctggcccaaaacttcaacagtgctgaggtttaactcaaactttgagtttaaacagaagcagagagatttaagtcactggtctaattagaagctagattggaagtcaagttcttcatggccccgagtttgtcttgttctggtcaacaagctctagaattatgggcaggtcttaggaagacaggaaagaggatttattttttaaagactcacctagcagttggccttataagtggctctttgttttgaaagatgcgctgaacactcaacttaagtgtcctcaggtgacagcagtaatccagacagtataatgagaccatcatatccttgtctgattgaaggtaaactgtaacctccatgagagcatccacaatcgtcttcacaaattcttcttcccgattctcatagagacagtaaaacaaaggcatatggtgcgtcaacttttccgggtcacggtccaaatgtttcatgtatcccaccgagtaccacttgaagctgtctaccatcggtagctggtatccaaaggatgtctcaagaatctttctcctgtttgcatttagaagaccaaaaatgaaagtaaacacttgattaaagtcagagtattgttctctcttctctttatactctctgctgcctgaggggatcagatagttgggtactgccatcagaaatgcaatggctgtacaaaactcctggacgttcaagtgtatgaacttgtaacggtctttatgagtgttgctcggcaaaagaatattcgcggcctgcaacacagagacatcagcctcagtaaacccaacacatctgaggtcttcaccactgaaattcagggtgctcagaaacagtcctcctgcagccagcaaacacagacgttttaggagacctaggtgatactgattggcagtaagtccagcctctgatgtcaacgcatcagcaagaaagtgggcatgtagatcagtgggtgtttggcagcagagctggaagtcacgccccttgtccatctgccgcttcaggacagtacacgtgatccagcataagatggcgactcggcacagacccacgagtatttcatcctcatgtacaagctggagggctgccgacgccctctggcggtctttaaagaaagagttaaaatatatctccctcttcccattcgacagctgcaaggtcgtgcagcaatctacctctttcaagaacgtttttacattattcccacgtgtgggccttgaggagatgaggaaccagcagcctggagccatttttctcttcagcaaactgaccaggagaactggaatgggaactttctgggtgctgttactacacaaagcactttcattgacatttaactcgaatcttatgttgtccaagtcctcgaggatgaaaaggagtttcttgggatcagacaggatgtctgcaatgggagcctggccgtcaggccagtccttggcgattagctcagccaagctgctgttggtcatctggtttatttcgtgagcagtgaggtgaacgacgtacgagatcatgttctgccacatctcacccttgatccacctcaacacagccagatttataacaatagtttttccagatgctctctctcccatcaggaacacattgagattgtttgctgaataatagctggtagaatcataggctaattgaagtatgtagaacacatctgacgaaacgtcacgaaaaaatttataatgaaattttccaaaagtgtgactttcccattgcagcatgaattttctcctcatgacagctttgcatgcctcctgattgcctaatccagcgagtacagggcagaaaatacagaacaaagatgaaagttcaagatgtaaaaacagttttagcttcttttcatgtttacagtaaaaatatagtagaaatttttacttactactgcttatcacaaagatataggtacaaagatatttaccatcatgttgcttgtttttgagatggagttttgctcttattgcacaggctggagtgcagtggcacgaactgggctcactacagcctccacctcccaggttcaagcgattctcctgcctcagcctcccaagtagctaggattacaggcgtgcaccaccacacctggctaattttttgtatttttagtagagacagggttttgccatgttagccaggctggtttcgaactcctggcctcaggtgatccacctgccttggcttcccaatgtgctgggattacaggcatgagccactgcgcccggcccatattgctttaaaggaaaaaggttgaataaaacctattcaactcatacagtggagtcgacagatctgttttagctttgttctttatccttcaagggcttccctctcatgtcttggcatcaagaacatatttctttcctttttgggggttccttagcgttttaggtagccttcaattatgtttcatttcatacccagtttttcctttgaggcaataactcgagttcagggactgtttcctggtacgtattcagctcaaagtatctattacatcttggcccatcagtcatgagttacacgttcatcttcccttctatttttttgtttatgcatatcattactgaaatcctgatcatttaatgaactacttaagataaatgaaattgtatggaataaagttaaaatttatcgtaaagggagtcttatttcttgagaatacacaagattgcactcccactgcaaaaacaaacaaaaatgttaagacataagtataaagctgtcatagaggtatgatacagaaatgatccaaataagtgaattcctagagggggatgactccttccttagtgagcagatacttgaaaatgtttttatccctgggtaagggcaggcaaaagagggagcctggcagcatggaagaactttgatgggataaataaaagccaatgatgaacagctgcagcagggctggtgtggtggacctgaatgtactggaatgtggcacactggctcccccccagtggagatgagcctgatggatcaacgggcctgatcccaccctctagactaccagggctgcctagttccgacctagcacatctcaacagcctggcagagacaggactttctccttactgtttttatctatgacgtttagtatacaataaaaaaattgagattcaaagaagcagaaagccatggtgatgagtatggttcatgattataaaccatgattcataatcaagaaaaaaaaatctttggaagatgtctatttaggtgtttttctttttgccaatttattgattaggttatctgttttcttgttatgcagttccttatatactttggatattagttccgtatcatacatagtttacaaatatattctcccaatccaggagtctcttcactcatttccctttgccattcagaagctgtccagtttcacacatgtacacacacacacacacacacacacacacgtaagagaataaatatgtgagataatagatttgttagcttcatgtcaacattccacaatggaagcatatcaaaacatcacattgtcccatataagtatgcataactatttgtcaaaagtaaaattaaaaaaaaatgaatagaagcatatgtacggataacccagcttttggaattaggaggtaattttataataagtttcatattatgcatatatccccatatattaggtatatagagtataagaatcagatggatgctctgtaacttaaaatatacactatgcaaaacaaagaattcattggaatggctgaatggcagatggcacacacagaagaaaggatgagggggcaccagcacagatcaatagaattggcctaacaagcacagaggaaaaacaatcacaaaaccaatcagaccatcagggaactgtgatacaatatcaaaggaccagtataaaatacgtgtaattacagtcccaaaaggagaggggatgaaaaggtattcaacatcacgaatcagaaatgcaaataaaaatcacgatgagctattcccttcacacctgttagaatggatattatcaagaagacaaacggtaagtgtgggtgaagatgtggagaaaagggaagccttgtgcacggtgtgtggggctgtcaattagaggagtcattacgaaaaatgatgtggaggttcctcaaaaaatgaaaaatagaactaccctaggaccctgaagctctttcttgagaatcctttgtggtcagaaaagcctgtcaaggacgtttttattttctataaacttagttcaaaaccttaagtttattcttcagtccatttctcccttgtcaccttttatgatgagcaaaaccaccaccaccaggctgcatctttattgtccccctaaatctccttatcttcaagttaataatgtgcattttccactgttatttcaggaacaaccttgctaaactttccaccagttcaggttcccacctgataaagtccactgaaggtcaaaggcatgttgaaaacttattaaaatggtagagggtggccaggcacagcgactcacacctgtaatcacagcactttgggaggcgaaggcgggcagatcacctgaggtcaggagttcgagaccagcctggccaacatgctgaaaccccatctctactaaaaatacaaaaattagcccggcatggtggcaggcgcctgtaatcccagctactcgggaggctgagacaggagaatcacttgaaccaaggaagcagaggttgcagtgagccaagattgcaccactgcactccagcctgggaaaaaaaattttttaaagcagaggaaagttacaggtcaagtagtttcttgacctgtagtttcctctaccctttaattacttgacttgtagtttctttccccactgaaaatttcaaggcccatcaggcatctaccaatttcctgtcccaaattccaaagctccatttgagttttgttttccactgggagcagtctatgtaagtactaagaccttttgcaattactactgcgatatgtcgagccatcccagaagaggtactgggtgaagaaagtgaagaaaagaaatcatatctgatattctcttaaatatctgcaatttggagagaagtaaacagagcaggtgagcatgtacctcatgaggaagggacagcacaacagtcttgagaataagatgatcaagagaagcaggaaggatttctattttctcagggccctgggcagaggaggaggggaaagacattgcaatgtccatggaagtgagaaactcactgagtggactcagccctgctactgacatttaaagggtcaccatggaggacacagccatggtctccaggaaagccttctctcaaacttgggttcacttccccctcattgaaaccctcagtagatagtggtaaaaatgtaaagggtaataagagattacaacatggcctaggaggcatgttcagtagactttacgccagactgatatcagtctgtggcctgttagggactgggccccacagccgatggtgagtggtgagtgactgagcactcctctgtatttacagccgctccccatcgctcacattaccacctgggttctgcctcctgtcagatcagtgggagcattggattctcacagaagcgtgaaccctattgtgaactgcacataggagggatataggttgcaccctccttatgagaatctaatgcctgatgatctgtcactgcttcccatcaccccccaatgggactgtctagtggcaggaaaatgagctcagggctcccagtgattctacatcatggcgagttgtagaattatttcattatatattacaatgtaatagaaataaagtacataataaatgtaatacatttgaattatccccaaaccatccatctccaccccttctagtccatggaaaaattgtcttccgtgaaactggtgccaaaaaggtgcgggaccactgctttacactataccaggacaagctatacattttggacacagttgtccataagcttgagctagataagaaaagagaagtgaatgacaggataaccatgcaactaaaaaaaaaattactaattctggaagaaaacactcaaggaaggaaaacaagtttaccaccatgtcaaggtacttaaagtgtaatttttaaaatatctaaaatatgaagtgaggcatggttagagaagatggtagaccagaagctggtagtgtgcaccgctctcatggagagagaacagagcagcaacaccagcttttcaactggattatctaggacacacgggattcatcaaggaagccacacaacccacggagaacagaagagtgagacaggacagccaccagcccaggactggcacacggcccaggaaggctcctgaccacagggagatggtgagtgagcaagagtccccacggattgttattttacagtgtatatcaaaacatcaagttgtacaccttaagtatacataatttgtatctgtcaattacatcacaataaagccagaagcatgtaggtatggaaggaaaaggtctaagaaaaatgtatggcctcaaaatagagaacatagacagaaagatcaaattcaggttacaaaaaaaaatccttgtaattatggagtatgtaaatatgggtgacaaatgttttaaaaagaacattcatatgcacccctattaagcttttaaactttaaggataaagaaattattcaggaatttagcaagaggctgggcacggtggcttatgcctgtagccccagcactttgggaggccgaggcgggcggatcacctgaggtcaggagttcaagaccagcctggccaacatagtgaaaccccatctctactaaaaacacaaaaatgagccgggtgtggtggtgggcacccttaatcccagctactcaggaggctaagtcaggagaatcactcgaacctaggaggtggaggttgcagtgagccgagattgttccattgcattccagcctggacaatggaacaagactccatctcaaaaaaaaaaaaaaaaagaatttagcaataaacatgaaaaaggaaaacaaatcttaacaggttaacatttctccaaacatattcagtgccagaagacacagaaggaatttatacaatattaaaaaggagtggctggagagtattacgtccagtaaagttcccatttgtgtataaagacatgcaaagagttttagacataaaattaaggagttcactaaggaattcactcatgaatccttctcagaggcagagatggaggaagcaacaatgaagtccagttaactaaggcaatgaaatgaattattcatcacatcagggacaggggtatgtgataagccaggtatagctttaaatatagaagaagcctaaacaaaaagatacttgtgattgccatcaatagtcgaggttatgagccttgactccataaagtatatataagccatgggttggaggagaatagcaaaggaaggccagaagcctgtgagtcataacgatgagtgaagacatgctatactatttaattgggaagatacgagtttaaccaagtaaatattgtataaaagttgtcttcaatattagaggaatttgaggaccaaactacttcttcattctaaagaagatctactgttcacctataagacacatagactgaaaataagagggagatattccatgccattggaagccaaagaagaggagtagctatgcttatatcagacaaaacagattccatgacaaaaactataatgagacacaaagaaggtcattatgtaatacaggggttgatctagcaagaggatgtgacaactgtaaatatatatgcatccaacactggagtcctcagtttagctctaataattgctttatgtaagagagactctaacacaattacagctgtagacttcaacatcccattttagtgtggtattcatgatcttggtaagttctcttaacccctcaggtattcaggttttcaattggaatacatgattttatctattttagagatgttcgggagggactaaatgagccaatgatgacgacctgcataggagtgtacccaaaatgttaaccctccatgacgcttacacagagtcccctacatttctgtagctgggtcttatggtaggagcgtacccggttgttaaccctccatgatctttacacagagcccctacttttctgtagctggatcttatggttctaggacagagctctctgctgggaaatctgctctagctcaagtactttctttgagtctaatcctttggctggctactttcatataagctggtttgcataataacagaaaataaaggtaggatcataaagccacaaaatagaacatgacccatatccaatctatccctggtcctcatgtgatgtccagttctgaagactggttctttggggatggaaaagtcatgtatcaaaaccaccaagctaaacaattccatcaacaagtggactaaggacacaaatagatgcttctcaaaagaagatacacaaatggccagtatctgatagtccttgaaaaaatgaatatgaaaaaaatgctcaacatcgctaatgaccagggaaatgcaaatcaaaaccacaatgcaatcccaccttactcctgcaagaatggccatgataaaaaaaaatttaaaaaatagatgttggtatggatgtggtaaaaagggaacacttttacactgctggtgggaatgtaaaccactatgaaaaccagtgtgactattccttaaagaactaaaagtagaacgaccatttgatccagcaatcccactactgtgtatctacccagaggaaaacaagtcattatacaaaaacacatgcacacacatttatagtggcacaattcgcaattgcaaaaatatggaaccagcccaaatgcccatcaatcaacaagtggataaagaaattatgaacacacacacacacacacacaaatactactcagtcataaagagaagcgaaataatagcatttgcagcaagctggatgggattagagaccattattctaagtgaagtaactcgggagtggaaaaccaaacattgtattttctcttaagtgggagctaagctatgaggatgcaaaggcataagaatgatacattggactacagggactcggcgggaagtgtgagagggaggtgagggataaacgactacacactgggtacagtgtgcactgctcagacggtggggatgccaaagttttagaaatcaccactaaagaacttactcatgtactcaaataccacctgcttcccagaaacctatttagaaaaaaaaaaaaaaaaaggcccaacacccagcttcctgtgaagtgccctgatttctgcccacccttctcgtgaccccactcacggtttcgtctgccaatgatcttcctacaaagatcttccttacgcatcattgaaaatatgctgaagagcatattccatatatactgtccctcataagagattggcaacacgttagccagttcttcttttgtcatctgtatcagtggaaactgtggcagtttgaaatcaagaatcttgcgtgccagatacttcttaaaactctgaaattccttgtcactgagattctctagataccacagcaggtcaaagtcagtagaatccgattctgccatcttgcttctccagggaaggcagacttcagagaagggattttgaggcacaagaaatatgagatctaaaaatagatgtggaatcagacaatcaaaccacacagtaatgccaattcatccaaagctaacatcctagacaattcctgtggtgtgatagaagctcctttctgataggccatcaacgataagtctgaactctttctgtctgggtcaatggccttgtcgactgatcttggcaaatttctaggttctgttaaggtggaacatcagttgtgttaaaaggcaacattcttatggtaaaagttatccctgattagcaaatagcatataggttgagaattgagtatcatacagaaactttggaggggagtgtttcttttgaaattgtcaaccctatgcagattggaaatctagacttgtggtctcttacaagatatgctgttgtatatgaaactcctctatgttagaataatctgtatagcaattggctgtatttacaatgattatactccttggaggtatgtcattgatacgtataaggactcctaatgaagaggcaactgttataataagcaaacaggctgtttgtggtcttgtatgctgctgaaaagaaatctaagttatgatgtactctgttctgtcttgttagtatataaatgagccaaagacagcccctaggttattttttcactctaggctgaaatctgttagcgcataaagcccactggcttcagactcaagttttttatacaaccaattgttttaaacacagcccaaataagcagatgtttagccatgtagagcctgcccgctttgcatacctcgcagaactgctcccaacatctgccagcaataggtaagtccccagggtcaagatgactgcaaggtgctactgccctttggagctctcggacccaggagatcttcctccccactgtactgagtggtatcgcctacacacacacacacacacacacacacacacacacacacacacacacacacacacacacacacaggttgcctcttcaattctaccccacctctgcaggggttccccatcttcctgtcctcctgagtagggacccacacactgtagcccctggccaggctcctgctgtaagagacatgccccacacacaaacctgtgaaaatgccacccaaaaaagcatgtgtgcaactgccaccccttggttatcttttcccttgaccaatttctaaaccccgtgagcctcccacacctgtcagtttcaatgtcagtctaatcctggtatcattacactccgtcacgagaagttgagattgccgagttgtgactaaagaatccattccagagccttgacccaacacagtcaaggctctcagagtttatgacaaaggtagagaaagaagatctgatcagatatgagtggatgtggattggctaacatctccatggttttacagcaaatgcttcgacacagagaacaagggataaatagtccctttgggggcgaaaaagaaagttggagaatggcaggtatctgcttgaggctagactgctcgatctctaaccatgaaataaacctaactagatactcaaccgtaactaggttgttgggcgtaaagaaaccgccagtgaagctgataagatgcaccaaatacaagacagagtcactggtattgtagacacactcaacagtgatgcctacctgaagggaagaagtaggcatattaagcttgcagacctcatataccaggtactatgttagaagatagagccactgggttggatctgactccatcgtggccatgaagtacatggaaagatactcatgatcccccaataaaggggtaaaaaaatgggcatactgacatgcacctatggtacctgagttttgcagcattgctatgccaatccccagtgcccaacaaggtaagaactatgacaccctcttccagaacattttcatttgccctaaaggaggacctgcaactagtaagcagtcactccctgtttccctctcctcccctaaaggagcctttaaatgcatggttgagctggcagaaaaaacaataaggaagtcactgagtttcagaaggcacgcatgcacccagggagtcgctttcatgttaggtcaggtgaagtcgagcaaactttggcagcctagagctcagttttaggaaatcatatacaattttagggcaaaggagaagacaaaccctggggcacattgaggtgggaggacagatgaaaggccaccagtcagtggcaggggatagacaaatgagaaggttaactagaaaatcccactgaacagagggtggtggaattcttactctgctcagtatcgggtctgaggaggaaaggggaagcaatcgcaccctttgagttcctaaacctaagctggacttcggagagtaatcatcccacagcttttcgtctcatgtatatttttgtattctggacctaaatgcacaaacatgctaagaaatctttcgaaaacttagtttttcaaaaatgtcttaatctctcttaactcagaaaaaaagtcattacctgaataaaatggaatgtgaagccataaagattggtttctaggtctatatttgctggacctacaaagatatttataatatactattgagataaaaagcagtgaatgggactggtaccctgacatatgtacatacaggtgtcgtgttggctgaagccaggatttcagggtgtacagaagagagttaacatgacacgtccgaaactgccatctttaggatctgcctgctacattggccgttggctagcatctggaacctggatgtggaaggcaccccccacccacattcccagagctgataagagtggctcacatgcctttatggcttgtacagacaacatggcttatgctgaagctttgctgtccttctgggagcctggaagcttgcaatttccttccatctaagcagtgagccaattttctcggcactgtttaatgcatattttggaatatgctagggagaggatgcctatgtgaccagctctctctctctctctcacacacacacacacacacacacacacacacacacacacacacaccccaagcactgagtttgtaatgatcttccacagcagccaatacctcgtgtgtgttttttatcacttgctgctgggggaattccacatgtcctgggtgactctgccgggagaggacactcgggagcctggtttcctctggattttgtcccatgtgcctctttgctttgccgattctgctttgtagccctcactgtaataagtcacagctgtgaacaggactgtgcccagtcccaagtcatcccacctaacccaactaggggatggcattcaacacctgacacacagggtaacaggaaatagcctcacaacattgaatgacgtcctcctaaactcaccatctcttaccttgcagcaggcaaacccattaacattgttagtgatgggagaacccattaacattgttagtgatgggagaacccattaacattgttagtgatgggagaacccattaacattgttagtgatgggagaacccattaacattgttagtgatgggagaacccattaacattgttagtgatgggagaacccattaacattgttagtgatgggagaactgctttcaggtctaattactcccttaaatggaagtctccatcagggcaggaccactgtttctctttctccccagtgttctcagcctctgtatccataattgacacttagcatatttgccaagaggtcagt[141 bp omitted]tgaaaccccatctctactaaaaatacaaaaaaattaggcaagcatggtggtggtggctacctgtaatcccagctatttggaaggctgagacaggagaatcacttgaacctgggaggcagagattgctgtgagctgagatagtgccactgcaccccagcctgggaaacagagcaagactctgtctcaaaaagaaataaaaaaagattgccttagtctcattggaatttctcttctctctcaccctaaaatgatatctttacgtcatgactgaagatgtcaaagaaaaattttagaactgaggcttagaattttatcagactgcagggaggagccaagatggccgaataggaacagctccggtctacagctcccagcgtgagcaacgcagaagacgggtgatttccgcatttccatctgaggtaccgggttcatctcactagggagtgccagacagtgggcgcaggtcagtggatgcgcgcaccgtgcgcgagccgaagcagggcgaggcattgcctcacctgggaagcgcgaggggtcagggagttccctttccgagtcaaagaaaggggtgacggacgcacctggaaaatcgggtcactcccacccgaatactgcgcttttctgactggcttaaaaaacggcgcaccatgagactatatcccacacctggctcggagggtcctatgcccacggagtctcgctgattgctagcacagcagtctgagatcaaactgcaaggcggcagctaggctgggggaggggcgcccgccattgcccaggcttgattaggtaaacaaagcagccaggaagctggaactggggggagcccaccacagctcaaggaggcctgcctgcctctataggctccacctctgggggcagggcacagacaaacaaaaagacagcagtaacctctgcagacttaaatgtccctgtctgacagctttgaagagagcagtggttctcccagcacgcagctggagatctgagaaccagcagactgcctcctcaagtgggtccctgacccctgacccccaagcagcctaactgggaggcaccccccagcaggagcacactgacacctcacacggcagggtattccaacagacctgcagctgagggtcctgtctgttagaaggaaaactaacaaacagaaaggacatccacaccgaaaacccatctgtacatcaccatcatcaaagaccaaaagtagataaaaccacaaagatggggaaaaaacagaacagaaaaactggaaactctaaaacgcagagtgtctctcctcctccaaaggaacgcagttcctccccagaaacggaacaaagctggatggagaatgactttgaggagctgagagaagaaggcttcagacgatcaaattactctgagctacgggaggacattcaaaccaaaggcaaagaagttgaaaactttgaaaaaaatttagaagaatgtataactagaataaccaatacagagaagtgcttaaaggagctgatggagctgaaaaccaaggctcgagaactacgtgaagaatgcagaagcctcaggagccgatacgatcaactggaagaaagggtatcagcaatggaagacgaaatgaatgaaatgaagcgagaagggaagtttagagaaaaacaaataaaaagaaatgagcaaagcctccaagaaatatgggactatgtgaaaagaccaaatctacgtctgattggtgtacctgaaagtgatggggagaatggaaccaagttggaaaacgctctgcaggatattatccaggagaacttccccaatctagcaaggcaggccaacgttcagattcaggaaatacagagaacaccacaaagatactcctcgagaagagcaactccaagacacataattgtcagattcaccaaagttgaaatgaaggaaaaaatgttaagggcagccagagagaaaggtcgggttaccctcaaagggaagcccatcagactaacagcagatctctcggcagaaaccctacaagccagaagagagtgggggccaatattcaacattcttaaagaaaagaattttcaacccagaatttcatatccacccaaactaagcttcataagtgaaggagaaataaaacactttacagacaagcaaatgctgagagattttgtcaccaccaggcctgccctaaaagagctcctgaaggaagcgctaaacatggaaaggaacaactggtaccagccgctgcaaaatcatgccaaaatgtaaagaccatcgagaccaggaagaaactgcatcaactaatgagcaaaatcaccagctaacatcataatgacaggatcaaattcacacataacaatattaactttaaatgtaaatggactaaattctccaattaaaagacacagactggcaaattggataaagagtcaagacccatcagtgtgctgtattcaggaaacccatctcatgtgcagagacacacataggctcaaaataaaaggatggaggaagatctaccaagcaaatggaaaacaaaaaaaggaaggggttgcaatcctagtctctgataaaacagactttaaaccaacaaagatcaagagacaaagaaggccattacataatggtaaagggatcaattcaacaagaagagctaactatcctaaatatatatgcacccaatacaggagcacccagattcataaagcaagtcctgagtgacctacaaagagacttacactcccacgcattaataatgggagacgttaacaccccactgtcaacattagacagatcaacgagacagaaagtcaacaaggatacccaggaattgaactcagctctgcaccaagcggacctaatagacatctacagaactctccaccccaaatcaacagaatatacatttttttcagcaccacaccacacctattccaaaattgaccacatagttggaagtaaagctctcctcagcaaatgtaaaagaacagaaattataacaaactatctctcagaccacagtgcaatcaaactagaactcaggattaagaatctcactcaaagccactcaactacatggaaactgaacaacctgctcctgaatgactactgggtacataacgaaatgaaggcagaaataaagatgttctttgaaaccaacgagaacaaagacacaacataccagaatctctgggacgcattcaaagcagtgtgtagagggaaatttatagcactaaatgcccacaagagaaagcaggaaagatccaaaattgacaccctaacatcacaattaaaagaactagaaaagcaagagcaaacacattcaaaagctagcagaaggcaagaaataactaaaatcagagcagaactgaaggaaatagagacacaaaaaacccttcaaaaaatcaatgaatccaggagctggttttttgaaaggatcaacaaaattgatagactgctagcaagactaataaagaaaaaaagagagaagaatcaaatagacacaataaaaaatgataaaggggatatcaccaccgatcccacagaaatacaaactaccatcagagaatactacaaacacctctacgcaaataaactagaaaatctagaagaaatggataaattcctcgacacatacactctcccaagactaaaccaggaagaagttgaatctctgaatagaccaataacaggagctgaaattgtggcaataatcaatagtttaccaaccaaaaagagtccaggaccagatggattcacagccgaattctaccagaggtacaaggaagaactggtaccattccttctgaaactattccaatcaatagaaaaagagggaatcctccctaactcattttatgaggccagcatcattctgataccaaagccgggcagagacacaaccaaaaaagagaattttagaccaatatccttgatcaacattgatgcaaaaatcctcaataaaatactggcaaaccgaatccagcagcacatcaaaaagcttatccaccatgatcaagtgggcttcatccctgggatgcaaggctggttcaatatacgcaaatcaataaatgtaatccagcatataaacagagccaaagacaaaaaccacatgattatctcaatagatgcagaaaaagcctttgacaaaattcaacaacccttcatgctaaaaactctcaataaattaggtattgatgggacgtatttcaaaataataagagctatctatgacaaacccacagccaatatcatactgaatgggcaaaaactggaagcattccctttgaaaactggcaaaagacagggatgccctctctcaccactcctattcaacatagtgttggaagttctggccagggcaattaggcaagagaaggaaataaagggtatccaattaggaaaagaggaagtcaaattgtccctgtttgcagacgacatgattgtatatctagaaaaccccattgtctcagcccaaaagctccttaagctgataagcaacttcagcaaagtctcaggatacaaaatcaatgtacaaaaatcacaagcattcttatacaccaacaacagacaaacagagagccaaatcatgagtgaactcccattcacaattgcttcaaagagaataaaatacctaggaatccaacttacaagggatgtgaaggacctcttcaaggagaactacaaaccactgctcaaggaaataaaagaggatacaaacaaatggaagaacatttcatgctcatgggtaggaagaatcaatatcgtgaaaatggccatactgcccaaggtaatttacagattcaatgccatccccatcaagctaccaatgactttcttcacagaattggaaaaaactactttaaagttcatatggaaccaaaaaagagcccgcattgccaagtcaatcctaagccaaaagaacaaagctggaggcatcacactacctgatttcaaactatactacaaggctacagtaaccaaaacagcatggtactggtaccaaaacagagatatagatcaatggaacagaacagagccctcagaaataatgccgcatacctacaactatctggtatttgacaaacctgagaaaaacaagcaatggggaaaggattccctatttaataaatggtgctgggaaaactggctagccatatgtaggaagctgaaactggatcccttccttacaccttatacaaaaatcaattcaagatggattaaagatttaaacgttagacctaaaaccataaaaaccctagaagaaaacctaggcatgaccattcaggacataggcatggccaaggacttcatgtctaaaacaccaaaagcaatggcaacaaaagccaaaattgacaaatgggatctaattaaactaaagagcttctgcacagcaaaagaaactaccatcagagtcaacaggcaacctacaaaatgggagaaaattttcgcaacctactcatctgacaaagggctaatatccagaatctacaatgaactcaaacaaatttacaagaaaaaaacaaacaaccccatcaaaaagtgggcaaaggatataaacagacacttctcaaaagaagacatttatgcagccaaaaaaaacatgaaaaaatgctcatcatcactggccatcagagaaatgcaaatcaaaaccacaatgagataccatctcacaccagttagaatggtgatcattaaaaagtcaggaaacaacaggtgctggagaggatgtggagaaataggaacacttttacactgttggtgggactgtaaagtagttcatccattgtggaagtcagtgtggcgattcctcagggatctagaactagaaataccatttgacccagccatcccattactgggtatatacccaaatgactataaatcatgctgctataaagacacatgcacaagtatgtttactgcggcattattcacaatagcaaagacttggaaccaacccaaatgtccaacaatgatagactggattaagaaaatgtggcacatatacaccatggaatactatgcagccataaaaaatgatgagttcatgtcctttgtagggacatggatgaaattggaaatcatcattctcagtaaactatcacaagaacaaaaaaccaaacactgcatgttctcactcataggtgggaattgaacaatgagatcacatggacacaggaaagggaatatcacactctggggactgtggtggggtggggggaagggggagggagagcattgggagatatacctaatgctagatgacaagttagtgggtgcagcgcaccagcatggcacatgtatacatatgtaactaacctgcacaatgtgcacatgtaccctaaaacttaaagtataataataaaaaaaagaattttatcagactgcaaagttagtaatgatgtcaattaaagtagatctgtacttctcatggagaatactcattgcaacaaattttaaatcccaggagagctgctatgtgtgcacatgtgtaaggccactgcagccccaattaagtatatcataattatggtatcacaaatccacactgatacgaaatatgcattaaatggtgctgagaaatttggctcatcacctagatggaaggaaaatgcaagctttccatcactatacaaacaaaattcagtaaataagattgggttgtattttttaaggaatgattgggacttaatatttaattaagaaatatttaatcatgcccttgtttctgattttatacttatagaataaggaatgttccataagctttacgtgtcgtgactctggggcttaataaaaacagatgtatatctgacctttgaagaaaaatatgtagacaggagagatgaagataacatagagaagattttaaagttattaagaattctattcacaatcattgaggaaatatcaattagatatagaacttgaagagacaagaagttacaaatggctaacacacgtatatacaaaattagcaccttgtagttcagtcaacagcaacttccagcaatcaatttaagaagcattgcactgtggtcagatgagggtatgaaatgttggtgtaaaacagtgttttgccttttgagaaaagtaagtaataagagcttttaatatacatacacacgctgacacaatattgcattttttttttttttgaggaacctatgaagcagagtcactaggcataaagcttatggaatactctttaaatcatcctatacaatagtataaaatcagaaacacctgaagtctgacaaggacatgattagatatttccggtgcattattatgta[132 bp omitted]gtgaagccttgtctctactaaaagtacaaaaaattagccgggcgtggtggcacgcgcctgtagtcccagctactcagaaggctgaggcaggagaatcgcttgaacctcagaagtggaggttgcagtgagccgagatggcgccactgcactccagcctgggcgagactccgtctcaaaaaaaaaaaaaaaaaaaaaaaaaaatcgtactttaaagaacacaagaaaaagctcataaaacagcgtttacagaagtatgaactgtttgagtctaaaggtaactccactttcttaaacatattagagggaaatacagttgactcctgaactcaaaagtcaatgctgccagcccctaggcagtcaaaaacccacgtataacttttgacttccaacactcatagcctactattgaccagaagccttatcaacagtcaattaacacataagtagactcacatctatattgattgcattcatgacatatctgactttaattttttaagtatttctaggctgcctggttcatctacaagttgtcatacatctcccccaaaattctccaatatatttatttttgaaacttcatgtataagtggacacatgcagctcaaacctgtattgttcaagggtccactgtaaatctgtttaacacaagtgttttcttcttttaaatcttgtatctaggtgtttttcccccctaagtgaacacaagtagattagggattagtaagttaagcctcaccaagtccaacccttccccaaattcccaaactcttccctcctttgacttctatttcaccattgcctttgagccccatccttgtaactgagagacttccgagttcaggagtcaactgtatttctttctagtgatatgtttgtctaataaagtagttacctttagactcaaacagtccatatttccctaaacactgttgtatgagctttgcttgtgttctttaaggtatgatttttaagtggtttggtaataatgcaccagaaatatttaatcatgaccctctcagtctttaggtgtttctgatttcatactgtgacataggatcattcaaggaaaattccataagctttttgcctagtgatggcttcttagcttcctaaaaaaaaaaaaaaaaatgcaacgttgagtgtgtgttaaaagctcttattacttttcccaaagggcaaaatactttttttacaccaaccttttgtacactcatctgaccacactgcaatgctttttaagttggttgctggaatttgctgttgactgaactataaggtgccaactgaactatgaggtgatctccaacacctgcaaaaaagctgacactacagcattgcacgtcccaagtcggcgttgcatcagattagctgatcaccgcacagttgggcacttcaagcacctgtgaccagactttctcaagcactgagacacaggggaatcacctggggagttatcaaaaaccccagtgtcccgaaatacagacactgattagagactttggaggttgggcccaggaaccagtatattgttccaatcccccctgtaaattcagcactcaaagttaagaatcaatttgtaaactaaaaataacatgttaagacccaccgccccaccccccccatcccccccacccccccgcccacaaccaactgagcggaccccctcctggccaagatacttgaaaaacagaatcattgactatggcaggaagggaggtcaaacctcctcctatctccttcctttcggagcctaggc[132 bp omitted]acatggcgaaaccccatctctactaaaaatacaaaaattagctacgtatgctggcgtgtgcctgtcattcctgctacttgggagtctgaggtgggagagtcacttgaacccaggagacagaggttgcagtgcgctgagatcacaccactgcacgccagccttggcgacagagcgagactccgtctcaaaataaataaataaataaaaatattcttttcatctctaacactttatacatcacatagaagaatagcatccataaggctatgatgacgagttagttaggtttaaacactccacccacagtgcacatacacttcaaaacatcatgctgcacacactacatgcaattttatctgtcaacttaaataagtttatcaaaaaaaaaaaaagcatgacccaaatttactcatgtgaacttgaaaaaggtaacagagcttggcctgcccttaggaactttagtcattttattccccaatcatattatttccagctcctaaccaaagagaaagctaaagaaccaatgtaacataataaaaaaagaccttaaaatccaaacaaacaaatcggccagaaaggtaactcaccaaccctgccaccaggtctccttggctggtcgaaagcaaacaagctaggcagcgggaagaaaaaggcggtgcctgcccggtgattagccagctgactcctctcttgattggccaaggtgggttcttgatgaccttcgcgatggaggggaaatactgctgcacctgcgtgtttctgcccagatgccccaattgtctttcttcacccaggactaaacagggtctgctgattaggagacggtccacaccccgtttatgatgttggagctcatggggcatctgaccaagaacctccaaaacaattgacttaggcagtgccgggggaaagaagttttccaccaataatctcaatttcggataaccatctatacagtaagctccatgaggggaatacgctgtctagtctacataaccacctggcaaggatcctttcaaatctgagggaggccataaatatttgtggaacaaatgcaaccaaaggcatgtttaacaggtgatagaatttgcggaggcacgtcctagatcctccacccggggggcccgtcttggctgcctattggaatcacctggagacctctagtgaagactgatagctcagtcctatgcgcaggtatctgctttagtcaggagggagtatgctctgggtatgactgatagagctcctcatattgaacagattacagaagaataggggcatcttcataggtgcaaaaggggaaatataaaagagtctatatctattcatggttttagatgtatctttgtaagttaggaaataaaagaatttccttcacccagtaaagggttccaaaaaagcaagagcaaacaaaaatctcataatggacgggaaagtgatgaaagaataccttttacaataagatacaagataaacaaggcctccgtcaccactcttatttcaacatagtgcacctgttcactgggacaagaaaacggatctgaaagaaagaggcgaaattatcatattggagataatttgaatatccatgcaaactctctccccttaaatctattgataaattgttaggattcaaagcagctttggtgaatataaatcaacatacaaatctgattgtgtttctctaaaaaaaaactaattggaatttaaaattttaaaggatgccacatgcagttccaagaaaaatataaactagaaataattcttataagagattgtaaatcttattgaatgatatacaatgttattgccatatacaaaatccttaaaaatgaaggataacattacattcttgtacaggaattattattatgaagatgttaatatgctcccaaatagacctttatattcagtaaaacaataaaatcccaatagaaattttcatatcaaaatataattctgaaatgtatgtggaaaatagaagggactagtacaagccaagagacgcctgaagcacataggtgggtgggaggtgggaatgatgattgagttggacctaccctataaagatttaatttaaaaactatggtaattaagacttattggttggccgggggcggtggctcatgcctgtaatcccagcactttgggaggctgaagcgggcagatcagaaggtcagaagatcgagaccatcctggctaacacggtgaaacccccgtctctaccaaaaatataaaaaaatttagccaggtgtggtggcgggcgcctgtagtcccagctactcgggaggctgaggcaggagaattacttgagcccgggaggaggagcttgcagtgagccgagatcaggccaccgcactccagcctgggcgacagagcgactccgtctcaaaaaaaaaaaaaaaaaaaaaaaaaagacttattggcacacggatgaacaaataatagtgaaaaaaacatagaacccagaaaccaatgtaggcaaatacgaaaagctggtttataacagatttctgggcagtggcgtaggtgaactattcattaaatggagctggtgccatttgtatttaaatgaaaaaaaaaaaatggatcccttctccctaccttagagaaaaataattacaagtgacttaatacttctgtgtgaaattcaaaactctatcatattttaaaaggcaatattagatatcttcatgagttggagtagggaatgatttttgtcaacaagacctcacatttataaaacataaagtacattttgatcaatttgatttcatttaaaataaaaactcttcagtgaatggttcttatataacaaaagctacaaaccacaaactaggaggagatatatgaaaatacgtgcatcacacataactgaccaaaccactttttcagaaaaggtaaagcacttcttcatgcaaataaaaacagaacacaaccaatagaaatacaaggaaaacaatgaaaaggtatttcacaaaagaggcaacaaatggctcacaaacatgagaacaatgttcaagtatattaataatcagataaaagcaaatgaaaacaacaaaatactttttccaactaatatttggtgactactttaaaatgtcaacaacatcaggagtaggcagtaaggtgcagctatggggatattcaactgtgcatgatgctaatgtaattagtgaaaccacttctgaagaggcaactgaagtcacctgtgcctcagggactcagtcattccactcaggtaatccaaaagtcctgtgggctcactgatgtgtgcaagaaggttcaaaacagcattgttcatattggcaaaaactgagaaaccacccaaccacctatcactgacagaatggatcattaaatggtgacctagtcatacatttaaataccgtgaggcaagacctagaaatgaaccgcagctataacaaactcgcattgattaatctcaaaaacataataagtgaaaagaatcaagtcacagaatgatacactataattcgaaaatgaggaaaacaaaacatatctcttaggggaacatgtatcaccaggaaaaataaaaagaaaatcgaagggaatgaagttcacttcacaactggaaatttattttggtgggaacccctgaggatgcaacgggcatgctcttatgggtacatgagtctgcaaaggtccccatcatgtctgcttcccaatctaggttctggaccacagagacttgtgttatggttacagtaattccttaaagttctcattatgtttctctgcactccttgatgtgtatatttcaaaaccaggatcatcaccatcgtaacactgaactcaggattcttataaggaggaactaaaatggtgattgtaaaaggatagctcctaggacactgaggtttggcgtgaacccagaagatgactgtaacgattgtagggaagctggaatagcaggaaaaccatgcccaatgatgaaatctcgaccttgcgtctaaaaaacttagcgcctgttctgcctacgcagaaagaca[136 bp omitted]accctgtctctactgaaaatacaaaaattagccgaggccaggcacagtggctcatgcctgtaatcccggcactttgggaggccgaggcgggcagatcacttgaggtcaagggttcgagaccagcctggccaacatggtgaaaccctgtctctactgaaaatacaaaaattagccgaggccaggcacagtggctcatgcctgtaattccggcactttgggaggccgaggcggtcagaacacttgaggtcaagggttcgagaccagcctggccaacatggtgaaaccctgtctctactgaaaatacaaaaattagccgaggccaggcacagtggctcatgcctgtaatcccagcacttcgggaggccgaggcgggcagatcacttgaggtcaagggttcgagaccagcctggccaacatggcgaaagcccgtctctactgaaaatacaaaaattagccgggcatggtggtgtgcatctgtaatcccagctactcagcaggctgaggcaggagaatctcttgaacccgggaggtggaggttacagtgggccgagatgacgccactgcactccagcctgggtgaccgagtgagaccgtatctaataataattaataatttcttcttgcacgacaggtttagttacggcagaaagatgttgtgccacacgaacattcttcaaggagtttagcatgtaggaaggaattagacatttaaattataaacagagtcaccccaactctccaaatgaaccattttggagagactggaggagcatccctgcagccgtgagccctgggaattctcaataggaacctccagcttgaaatatcccccgctctatacgacaccaggagcaaaggtctagaacagcccctcaaggggcggtgggcgtttcgcttcacatattttctggatctgttcatcaaaagccctctgagccaatggcaagggagcaattcgttggccaatcaaatggcaccacggatcttttcttcccgcttccagccgccaatcattaaggaccaggaaggcgtggagcggtgagtcagcgcttcgtgctgggctgttcgtctcttctatgtgctgatttcctgggttactttgggtcttccttttctttctcccttttaccctgtctcctttcttgaggctgatcgatcacagccaggcctctccattctatttacccagcgttttccttctctccagttagtggggtagatgaacgccctgtgtttataaggtgcctcccaggagcctgagacctgtgagaagaatggggggtggaggtgggggagactcgtcacgaagggagaccttggagcttcgagggtgggaatgttcttattagattcttcatctctgttgacacaaacatgtaggagaagctggagaacatagacagggatgaggtaaggggggggacttcccatgaaaggtgggacccaagccctctctgctcttgtgagcttgctctctgacctagggcagaaacgtctttgatactgtaattccagaatgtgatttaaaaagaaaatcacacttctagttgactcatactaattatgtatattagctgcagagagatgtgttggtacatgtatacgtatcattaaatcagggtaatgagcatatccatctcctcatacctgtatcatttctttgtgttaggaacattcagaatcctctccttaggtgggaggagggagagggtcaggaaaagatagctatggggtcctattcttaatacctgggagatgaaaaactgtacaccaaacccctgtgacacgagtttacctgtataaccagtgtatatgtacccctgaacctaacataaaagttagaaaaaccctcgaaaataataagatattaagtatattcaacctatagtgctactgaacaccagcacctattcctacctacaggtgtaacttggtatccattagccaacctcttttcatcccccttctccaattatgccatttgtttagactatgaaacgtatatagaaagaatatttatctttctatatcaataaaagttggtttttactgttaagggttgaattgtgtcccaaccctaaaaacacacacacacacacaaagtcctaacccctttatagggtgacaaaataaggttgttgcagatgtaattagttaaggcgaggtcatactggagtgagtggcccccctaacttaatgacgggtgtccttatgaaaacggccacatgcggctgggtgtggtggctcatgcctgtaacaccagcactttgggaggttgaggtgggtggatcatctgagctcaggagtttaagacaagcctggaaaacatggcaaaaccctgtctctactaaaaatacaaaaatcagctgggtatggtggcaggtgcctgtaatcccagctactcaggaggctgaggcaggagaattgcctgaacccaggaggtggagattgcagtgtgccgagattgcaccattgcactccagcctg[139 bp omitted]aattagccaactgtggtggcgcatgcctgtaatcccagctactcaggaggctgaggcaggaggattgcttgaacctgggaggcagaggttgcagtgagccaagattgcgccattgcattccagcctgggcaacaagagtgaaactccatcttagaaaaaatggccacatgaaggtagagacaagcagaatggcatgtgacaaagtcagagtgaaattacatagctgcaaaccaaagagtgacacaggttgccagcaaaccacagaagccagtaagaggcaaggaagggctcccctgggtttcagagagagcagcaccctgccaacactttgattttggacatctaggctccagaaccatgagacagtaggtttctgttttaagttacctagtttgtggtacgttgtcatgccagcccaaggaagctagtacgctattaaaagaaaaaaatgatgtgattttacacttagagaacagcttcaagaatatatccttaggatcaccaaatgttaaaagtttaccttatatggtgtccctctactcttatataagtatttttcctgatctgttcaagatttgtacacattgtacaaatttacatctaataatttaccctaaatgcttcagggtttatcttctaaaaataaaaataaaagtaagctcttttgataaccacactatataaaaaacaggaaattaatagaatgatattatctaatgtacagatcttacacttaatggactttttaatttttgcatttgttttcacaagtagaccgaacatggaaattcttacactaagcctgttttttttttttctttttttaaatttaagttttgggatacatgtgctgaatgtgcaggtttgttacataggtgtacacgtggcatggtggtttgctgcacctgtcaactggtcatctaggttttaagccccacatgcattaggtatttgtcctaatgctctccctcccctttcccacccctcacccacgggcctcagtgtgtgaatgttcccctccctgtgtccgtttgtgttcttattgttcaactcacacttctgtgtgagaacatgcagtgtttggttttctgttccagtgttaatttgctgaggatgatgtaaacctgttttcattatctaacctatgcctcagtttgagtgtgtgtgtgtgctctttcacacacatatacacacatgcttatgctctcacacacacatacccacacacatgctctctcttagattctggaaaaataatttttatttaaattttgacataatttgctgatgaagatgtttgagcctgaagtcttctgtgggggaagagttaaaaaaaaaaaaaaaagctttcaaaacttcacacacacaaaatagatgaaagttgtcattttctaagaatttatatatttgaacaaaattatcagttttattggcataaaaatggtaatagtctcaatttttgatatctgtagggtatgtagtggtgtcttctgtttctggtattaattgctcatgtcttcttattcatcagacttgttgggggttatccagtttgtattttcaaagaatctacttttgacagagtcttgtattttaatttttatttcattgattattttttctactttcttttggtgtgttttgctttttatctaaatgtataattagtttatgaattttcaaccttccttatgcctttgaagtagcacatttttccagctcctgatttagctgtatttcactcacttcatatgcaacattaaatattcagttcaaaatcttatatccgatattttctctttattcatagattacttagaagtatgtttcttaattttggaatgtccttcatttcattgtcaaattctgacttaaattatgatcagaatattctgtgtaacttatattatttgaaatatgttgaagcttgccctgaggatcagtatatagctgacattggtagctgattcgtctatcttatagtgttttttccatttattgaatgaaaaggtctgtgtccacaaggtaaaatttttccattgtttttaagccctttattttctttttaacttgtttgtttaattgctggaacaaattgataaaatatcctgctatgattagggacttacctaattctccttatggtgctgaccattgtcgggggtgtgtgtgtatagacatatgtgtatgtgtatgtgtgtgtgtgtgtgtgtgtgtgtgtgtgtgtatacatattttcttttttctttttgagacagagtcttgctctgttgcccaggctggaatgcagtggtgccatctcagctcactgcaagctttgcctcccgggttcaagcaattctcctgcctcagcctcccgagtagctgggattacaggtgcctgccaccacgcccagctaatttattattttttattttttggtatttttagtagagacggggttttaccatgttagccaggctggtctagatctcctgacctcgtgatccgcccacctcggcctcccaaagtgctgggattataggcgtgagccacagcacccggctgatcattcgtatattttaaggctgtgttattgttgcatgtatgattataattgttctctcttcctggtaatttgagccctgtggttatgcagcatctagatttctcaccaatgttttggcttggggtctgcttttctggtatcaatattatgacaacagatttttttaaaagcctggaataattcaatatcttttccttctaattcaagtcgtgcaataaatggaatggatgaagagtttggtgagtaagatgggttatcataccttacgtatgcatgacatgctattttgttcagatttcccatttaaaaatttcttaaattgacatataattgtacatatttatgggatacagtgtgatgtttggacacatatatccattgtataatgatccaatcagggtaattatcatatctgtttgtttagacacatttctttgtagtgatactcaaaatcttctagctattttgaaatatccgccacactgttatttgctttagttaccctaatttgtaagagaacactagaacttgcgctttctaactgtaagcgtgcctgttgaccaatcgctcctggtctcccgttactctcccatcccttccccagcctctagtaaccactgttctactctctacttctataagttcatctttttagattccccatataaatgagatcatatggtagttttctttctgtgcctgccttattttacctcgtgtcctccacgttcatccaggttgccacaaatggcaagatttcattattttttatggctaaataatattccattgagtatatataccacattttctttatgcattcatttattgataggcacttagtttgtttc[133 bp omitted]aaccccatctctattaaaaatacaaaaaaaagttagccgggcatggtggcaggcacctgtagtaccagatacttgggaagctgaggcaggagaatggtgtgaacctgggaggcagaggttgcagtgagccgagatcgtaccactgcactccagcctgggtgatagtgcgagactctgtctcaagaaaaaaaaggtgctgcaatagacatggaagtaaggatatctctttgacatacgaatttccttttttaaagaggtatatacccagcagtagaattactgggttatatggtaggttctattcttaattgttttagaaacctccatactgttttccatagtggttctgctaacttacattcctaccaatggtgtgtaagagttgccttttctctgcatccttgccaacatttgttattttctttagccattctaacggggtgagttaccccagattttttaggttcaaatttgcatgtttagtctttcaactttcgtttttccgttcttagttacctctttaaagagcaagtatttggtttttgtatttagtctcaccatctttgcctctgtaccattgaggcaattattctgtgtaattactaataagagttcgagttgaccatcacttttttatttaccttatctgttctaggttcctatttctgtccttctttattttttaggttagtttgtcatttttcctcttctctatttactttggcagacaaacttttttatggttatatcagaattctatcagtgggcttatcagaatttcttatcaaatttttacttctgtcatcttcccagagaagaacattagagcacttgatgtcctttttcttttttttttagatttacgtgccagctgtgataaattttaattctattttctgtctcacaagactgactctataaagcaacttgtcttctaattgactgtggcatctcttaattttcacctgcaataattttccttctctccaatggtcaattttcaaaatttcctatagtgtaagtcttctgttggaaaatttgtcatttatctgcaaatgtctacttttatttctttttattttatttttatttttga[155 bp omitted]gtatttagtagagatggggttt[134 bp omitted]acttgagtcagcagctatttgttttgagcaccttgcatggttgcttctttagtttcttctttctgtagcacctgatcaggtcagctgtcaacataatggcacaaccgttcaaataaattattgtcctccccttgccttacccccactctggaatgctttcaagattttcccttttgtgtaacttctttatgttctaatgtcattatgtttccctataatgtgtctagacatgggtttgttatttatactcttggactttattgggcttcttaattagtagattgatttttttttcattggttaatagaaacatccaggccaggcacagtggctcacacacctgtaatcctagcagtttgggaggcagaggcgggtggatctcctgaggtcaggagttcgagaccagcctggccaacatggtgaaaccctgtctctactaaaaatacaaaaaattagccaggcgtggtgatgggcacctgtgatcccagctgctcaggaggctgaggcaggagaatcacttgaacctgggaggtggagtttgcagtgagctaagattgtgccactgcactccagcctgggcaacaagagtgaaactgtctcaattaaaaaaattataaaaagaaacatcctagtagcaatcttatattaggttggtacaaaagtaattgcggtttttgcatttttttcatggcaaaaaccacaattacttttgcaccaacctaataaaacatactacatctggtccacagtctcttttctccttttggggagccagtaacaagtgttagcccttttcatccttagtctcttgtcctctcttctgtgcttttcatctttttatctctctcttcttggatgacttctctttacgtgtcttctagaccactaattatctctgtcaaatctgatactaacacattgtattagcttcctggggctgctgtaacaacataccacaaaacagacagcttaagcaacagaaacttactgtctcacagttctgaaggctaataagtccaaaatcaaggtgctggcaggcgtaatttcttctgaagactgtgagggagaatcagtttattcctctctattaacttctacttgctttaggtgtgctttggttagtaagtggcattttccctgtggcatggtatcctcttccctctattcatatgtgtccagattttcccctttcttttttctttttatttttcgagatggagtctcactttattgcccaggctggagtgcagtggcatgatctcagctcactgtaacctcccgggttcaagcaattctcctgcctcagcctcctgagtagctgggaagacaggcacataccaccacttggctaagttttgtatttttggtagagatgggattttaccatgttggccaggctggtcttgatctcctgacctcaggtgatccgcccaccttggcctcccaaagtgctgggattacaggtgtgagctactgtgcccggccagattttcctctttcaataaggtcaccaattatattggatcgggggcccaccctgctttagtatgacctcatcttacatgttccagtacagctaattgcatctgcaaggatgctatttccaaacaagcccagacttcagttgcactttgtgacctccagtgtaactcattgtatctacgagtatgctattttcaaaaacttcatacttcagcatgtaacttttgcagggggacatacattggatgcagaaaagagtccctggtgatttttgtggtggtagtggtggtagaggagtgtgtgtgcgtgtgtgtatgcatgtgtgtgtgtgtttgggggaatatttaaagttccatctgtagccaatctgaatgcagtctttcccctcactttcagaggatctcttcccagagccggaggtattaatatttcagcctgtggcaagaggctacacttttttttaattattatactttaagttttagggtacatgtgcacaacgtgcaggtttgttacatatgtatacatgtgccatgttggtgtgctgcacccattaactcgtcatttagcattaggtacatctcctaatgctatccctcccccctccccccaccccataacagtccccagtgtgtgatgttccccttcctgtgtccatgtgttctcattgttcaattcccacctatgagtgagaacatgcagtgtttggttttttgtccttgcaatagtttgctgagaatgatggtttccagcttcatccatgtccccacaaaggacatgaactcatcattttttatggccgcatagtattccatggtgtatatgtgccacattttcttaatccagtctatcattgttggacatttgggttggttccaagtctttgctattgtgaatagtgctgcaataaacatacgtgtgcatgtgtctttatagcagcatgatttataatcctttgggtatatacctaataatgggatggctgggtcaaatggtatttctagttctagatccctgaggaatcaccacaccgacttccacaatggttgaactagtttacagtcccaccaacagtgtaaaagtgttcctatttctccacatcctctccagcacctgttgtttcctgactttttaatgatcaccattctaactggtgtgagatggtatctcattgtggttttgatttgcatttctctgatggccagtgatgatgagcattttttcatgtgttttttggctgcataaatgtcttcttttgagaagtgtctgtttatatcctttgcccactttttgatggggttgtttttttcttgtaaatttgtttgagttcattgtagattctggatattagccctttgtcagatgagtaggttgcgaaaattttctcccattctgtaggttgcctgatcactctgatggtggtttcttttgctgtgcagaagctctttagtttaattagatcccatttgtcaattttgtcttttgttgccattgcttggtgttttagacatgaagtccttggccatgcctatgtcctgaatggtaatgcctaggttttcttctagggtttttctggttttaggtctaacatgtaagtctctaatccatcttgaattaatttttgtataaggtataaggaagggatccagtttcagctttctacttacggctagccagttttcccagcaccatttattaaatagggaatcctttccccattgcttgtttttgtcaggtctgtcaaagatcagatagttgtagatatgcggcattatttccgagggctctgttctgttccattagtctatatctctgttttggtacactctgatcttgacactgtctccacatcaagaaaagtccaactctagttgcctgcttctccaagatggtctcagagcaaagcaccagcaatgttcttgcccaaagtcattctttaagtcagtggttttcaaatctgggcatgcgtcaaaattaactgacattatatataactgatgttatataacagatatataactgatattatatatctaatatcatcactaactatttgcccaaaattaacagatggctgtgccctaccctcagcatttagtgtgtctagggaaggacctggggatttgcatagcaagttaccagttggtgctgatgttccttggagaagtattgccttaggtgctcagtggtggcctcaggactcagatacatgttcctataattaagattttactaaaagtaggctttttaagactattggcaaaagcacgcaggggagaagccatgaaggtcacctttccatcatcatattctcattccgaatactgcttaataattttccctaatttttgtgggttttatttatttattttgagacagtcttgttctgtcacccaggctggagtgcagtggcacaatcttggctcactgtaacccccacctcccaggttcaagagattctcatgcctcagcctcctgagtagctggggctataggcgcctggctactttcccctaatttttggatcttagatgctattaaattttttttaaatttttctccaaattacctattttatttgaggggggggcagcaacattctgcctaatggccacccatgaataaaacagctttatttttattttccactgtataacttaacccttttattgactttgctattgatctctaatttcattgcccttaagacaaagaagatgactttgctactgttggctttttgtttttgaattatgatttcctttaaagctcagagcataattgattatcatgagcataattacaagctaattgattatcatgaatgttccacgtatgcttgaaaagaatgttctcttgtgtgtaggattccataaatattcataaaatgtgttgatttttatatatctaatatgaataactatttgccctatgtttttagtatcttttaaaattttagacttgttttagacacagaaaagtttgcaaaaatagtgcagagagttcccataaatcctgtgccacatttctctagtaacgactttcgttaccatggtacatttgtcataactaataaaccagtattaatagattattaactaagattattctttcttcagattcccccctttttacctaatatccttttttttttttttttgagatggagtctcgctctgttgcccaggctggagtgcaatggtgcgatctcagctcactgcaacctctgcctcccgggttcaagtgactctcctgcctcagcctcctgagtagctgagactacagacacctgccaccacgcccggctaattttttaatatttttagtagagatggggtttcaccatcttggtcaggctggtctcaaactcctgacctcgtgatctgcctgccttagcctcccaaagtgctgggatgacaggcgtgagccactgcacctggcccctaatatcctttttatgtgcctggacctcatctaggatcccccactgggtttcattgctgtgtctccattgagttctctaaactaggaccactctcaggatttccttgttttcagtgatcttgaacgttttgagaagcactggtcaggtatttgtgggacatcattcatgttgggtttgtgtgacgtttatctcattgcgagactggggctttgaggaggaagaccacgaaggaaaggtgcccttcccatcatatcatatgctaccacttgctacccatgttggccttgatctcctagcttaggtgtctggctggtttctccactctgaagttaatccctacccctttttatactatagtattgtatactatactatacgatactatagcatactatactatacattgagatggagtctcgctctgtcgccaggctagagtgcagtggcacgatctcggctcactgcaacctccacctcctgggttcaagtgattcccctgcctcagcctccagagtagctgggattacaggtacccaccaccacatccggctaattttttgtattttagtagagatggggtttcaccatgttggccaagatggtctggatctcctgaccttgagatccacccacctcggcttcccaaagtgctaggattacaggcgtgagccaccatgcccggctgtactatattctttaaaaagaagtctctatgtacaacccacatgatacggtttggctgtgtccccacccaaatctcatcttgaattgtggctcccataattcccacatgtggtgggagggacccggtgggagatacttgaatcatggggatggtttcccccatactgttctcctagtagtgaataagtctcgtgagacctgatggttctataaggggaaacccctgtcgtttggtcctctcttgtctgccgccatgtaagatgtgccttttgccttcccccatgattgtgaggcctccccagccacatggaactgtgggtccattaaaccacttttttctttataaattacccagtcttgggtaatgtctctatcagcagcatgagaacagactaatacaccacacttaagaggtggggagttatgccgcatctccttaaaggggaagaatccatccatctaagctacttggaattcttcttcttgctaaagttgttacagttttagctattggaggctctttcagcctgccctgggtttctttggttaggaagtggtcttagaaaccaagagctgatctggacactgggtgtatcgattgccactagggtatctgttatgcttccaggcccttgcatgagtgtgactgtaacagtaccgtagactaagactatacttccagggatcatttctatagttcactgcaaaatgctgcagactggatggcttaccaacagaaatgtacttcctctagttctggaggctggaagttcaaatcaaggtccagcagagtcccttcctgatgaagactttctggattgtacacagctgccttctgtgtccccacataatagagtcagaggaagagatggggagaaagagagccagggagggacttccagttgttccagcaccatttatggaagagacgatctgcctccattgtgcctttgtcaaaatgagttggctacatttgtggggcatgccttctctattgtttactgagaaaaatgtaatttctatatttacagtgtaatttctatatttaaaagtaaaaatgtaatttctgtagctgcggtgtaatttccaaagctgcggtgtaatttccaaagctgcggtgtaatttccgaagctgcggtgtaatttccgagactgcggtgtaatttccgtggccgcggtgtaatttccgtggccggcggtgtaatttccgtagccgcggtgtaatttccgtagccgcggtgtaatttccgagactgcggtgtaatttccgtagctgcggtgtaatttccgagactgcggtgtgatttccgagactgcggtgtgatttccgagactgcggtgtgatttccgtagctgcggtggaatttccgagactgcggtgtaatttccgtggctgcggtgtaattaccgtagctgcggtgtaatttccgtggctgcggtgtaatttccgaggctgcggtgtaatttccgtggctgcggtgtaatttccgtggctgcggtgtaatttccgtggctgcggtgtaatttccgtggctgcggtgtaatttccgaggctgcggtgtaatttccgaggctgcggtgtaatgtccgtggctgcggtgtaatgtccgtggctgcggtgtaatttccgaggctgcggtgtaatttccgaggctgcggtgtaatttccgaggctgcggtgtaatgtccgtggctgcggtgtaatgtccgtggctgcggtgtaatgtccgtggctgcggtgtaatttccgtggctgcggtgtaatttccgaggctgcggtgtaatttccgaggctgcggtgtaatgtccgtggctgcggtgtaatgtccgtggctgcggtgtaatgtccgtggctgcggtgtaatgtccgtggctgcggtgtaatttccgtggctgcggtgtaatttacgaggctgcggtgtaatgtccgaggctgcggtgtaatgtccgaggctgcggtgtaatgtccgtggctgcggtgtaatgtccgtggctgcggtgtacttcccgaggctgcggtgtactttccgaggctgcggtgtacttcccgaggctgcggtgtaatttccgaggctgcggtgtaattcccgaggctgcggtgtaatttccgaggctgcggtgtaatgtccgaggctgcggtgtaatttacgaggctgcggtgtaatttacgaggctgcggtgtaatgtccgtggctgcggtgtaatgtccgaggctgcggtgtaatgtccgtggctgcggtgtaatgtccgaggctgcggtgtaatgtccgtggctgcggtgtaatttacgaggctgcggtgtaatgtccgtggctgcggtgtaatgtccgaggctgcggtgtaatgtccgaggctgcggtgtaatgtccgaggctgcggtgtaatgtccgtggctgcggtgtaatgtccgtggctgcggtgtaatgtccgaggctgcggtgtaatttacgaggctgcggtgtaatgtccgtggctgcggtgtaatgtccgaggctgcggtgtaatgtccgtggctgcggtgtaatgtccgaggctgcggtgtaatttacgaggctgcggtgtaatttacgaggctgcggtgtaatgtccgtggctgcggtgtaatgtccgaggctgcggtgtaatgtccgtggctgcggtgtaatgtccgtggctgcggtgtaatgtccgaggctgcggtgtaatgtccgaggctgcggtgtaatttacgaggctgcggtgtaatttacgaggctgcggtgtaatgtccgtggctgcggtgtaatgtccgaggctgcggtgtaatgtccgtggctgcggtgtaatgtccgtggctgcggtgtaatttaccgaggctgcggtgtaatgtccgtggctgcggtgtaatgtccgaggctgcggtgtaatgtccgaggctgcggtgtaatgtccgtggctgcggtgtaatgtccgaggctgcggtgtaatgtccgaggctgcggtgtaatgtccgaggctgcggtgtaatgtccgaggctgcggtgtaatgtccgaggctgcggtgtaatttccgaagctgcggtgtaatttccaaaaatgtaaagtctatatttgcctggatattgaggctatgtcaggtgactataggattcttgtatcttctggattattgtatctctgattcccccatccattattgagactttcatgaccatttgaatgagaaggtgagatgaatgtaattaaataactttccgccttcattgccatccccccagtactagcaagatactatataatggtaatcttgatccatttatttgtaataacttggcactgtcctgaattttctacaggttttatttatttattgttcctggtcactgtctctttgaggattggtatctctgctccagaaaagatggcagcctctttcttctctgattttggtcttatgtggtatctggaggagctcaaaaaggaggagttcaggaaatttaaagaacatctcaagcaaatgactttgcagcttgaactcaagcagattccctggactgaggtcaaaaaagcatcccgggaagaacttgcaaacctcttgatcaagcactatgaagaacaacaagcttggaacataaccttaagaatctttcaaaagatggatagaaaggatctctgcatgaaggtcatgagggagagaacaggtgagggagtctgggaagggggaagccttcttataatgaggactatgtcctaattttggtgagtggtctctgcctgtctacaacaggacctgaatgtgctatgggaaaatattaggtttttttttttttttttttggtagacggagtcgcactttgttgcccagacagtgcagtagtgtgatcttggctcaccgcaacctccacctcccaggttcaagtgattctcctgcctcagcctcctgagtagctggaattacaggcgcctgccaccatgcctggctaatttttgtatttttagtagagatggggtttcaccatgttggccaggctggtcttgaactcccaacctcaggtgatccacccatcttggcctcccaaagtgctgggattataggcatgatccaccatgcccagcctgaaaatattgtccttgtaggcaggaaatggtctcttagacgtggtggttacatgtgggtaaaatgtcagtggctattatgtcctaacctgtattgtacctttatctgggtcaccaatgatttttaccctaagctgagaacttgcagtcaagccagaaactctgtgaggtgaagtcgttgcataagaactatgcacctgacttatttgcaagagcaattaacacctgcggtagaggatacagtgaactgaggttgactggtgtaatcatgtatttagccaaagttcacatcagacaagcaatgatctataagcaatatggcttttagagtcacatttgtatttatcctggcataaggtgttaactgttactttgcacatttgcgttatcaatggcaggatatagctctttcaactttactgccaaattgtttttctttgttgttgttcagtgtcttactgtgatgtgcctggatgtggctttgttttcatcctgattgggattctttaatattcttgcatctgaggttcagtaactttcttcagttctcaattttagccattgtctgtgtattccattcttctgtttattcttctgggactccagttacacctactggactttcttgtttgtttgacacagggtctggctctgtcacccagggtggagtgccgtggcatcatcacggctcactgcagcctcaacttcctgggctaaatgatctgccacctcagcctcccaagtagctgggactacaggtgtgtgccaccacgcttggctaattgcacacctggctaaccttttaaaaaaaaattgtagagatgagctctcactatattgcccaggctggtctcaaactcctgggctcaagtgatcctcctgccttggcctcccaaagtgctgggattacaggcctgagccaccatactggcctagactcactctttctttctctttctcttttcctttttctttctctttctctttctctctctctctctctttctgtctctctttctctctctctctctttctctttctttcttgctgtctctttctctctctcgttctgtctttctctctcttcctctctctttctctcttgctatctctttctctctctctctctctttctctttctttctctttctctttctctctctctttctgtctttctctctatttctctctttccttctttctttcttctttgatacagagtcacgctctgtcgcccaggctggagtgcagtggtgcaatctcggcccactgcagcttccacctcctgggttcaagtgattctcctgcctcagcctcctgagcagctgggatttcagatgcccgccaccacacccggctaatttttttgtatttttagtagaaacagggtttccccatgttggccaggctggtctcgaactcctgacctcaggtgatctgcacacctcagcctctctaagtattgggattacaggcatgagccaccatgcctggccttgatttcttaaatttagttcacatgttttatttatgcagtttgcctttttcacagacttccattttttctcaatatttattccatcttctattttattgagcattttaaattattttaaaatttgcctgaagattttaacatttataggtctgtttctactgtttctttttctctttatctggtcatacagtctcctagtatgtccggtaattttgagtgccagattttgaatatgagacattgaaaatgttaagaatctgtaatatcttgttccagtgaaattggaattgattctggtagtagttacagggaaatttccttaatattgaggattaaaataattggtttgaaataaaataatttgagagtttccatttttggcgatgctagcctttcttgctcattttcttgatttggaacatcacttggaaaaaacccctcccagtccaatttttttttctttgagacggagtttcactctttcacccaggctggagtaaagtagcatgattttggctcactgcaacctcactgaaccccccaggttcatgcggttctcctgcctcagcctccggagtagctgggattataaggcgctcaccaccacgcccagctagtttttatatttttagtagagacgggattttgccatgttggccaggctggtgttgaactgctgacctccggtgatccgcccgccttggcttcccaaagggctaggattacaggtgtgaaccaccacacctggccacccagtccaaatttttaaacaaattcccccatgtttcctggagtgttttggtgtcacacgctgaggtctcagctaccctggaagctgaggcaggaggatcacttcagcccaggaggatgaggctgcagtgagctgtgtttgtgccactgcactccagcctgggtaacagagtgagaccctgtctcaaaaaagtaatttatataaagaagaacattctttgcacatggaaccattttagaatattgctaaaataaaatgtaagcaggtctaaagttagatcttccactgggtacttacacttctctcttttcacagttggtttgaggttgtacccacttaattccccttatgagcaaccaaacatgtcaccgaaatctccagaacagctgagaagaccaggaaagcaggaagccattggggaatgggcaaacaacttagcttaagatgctaataggatcttcaccaatgtcagatggcattttcaccagttagggacttcaggggactgaaagattgggggaatcccttgttctccccaaaaacttaaggtagcattacctactgtcagcagtctgtgggcactggattatatctttcacctgcatccaatcaaatccagtaactattatgcggggcatagggaaaatttcccatctacaactgccccctacatctccagtccatcagcagctactcacttgcagaatataaacatcgtactagttatttaaggaacagataactgtaaaggagttttcggcctggctgaaggatcagcctctaggctggtgctccagagatgactgtaagaactatagtatcagggagctgctgcctctcctgcaaagaggaaagtgggagatgggaagctcactgttagaactgtggctttagaaatacaccacgacagctatgattcagaaatcgggaagctcaccagtgtagcagctgcttaaaatcaatgaccacagcaactggttttagttttcgagacagtctcgctctattgccagggctagattacagtggtgcaatctctgctcactgcaacctccacctcccaggttcaagcgattcttctgccctggcctcccgagtagctgggattataggcctgtaccaccacgcccagctaatttttgtatttttagtagagatggggtttcaccatgttgaccaggctggtctcgatctcctagcctgaagtgatctgcctgcctcagcctcccaaagtgctgggattataggcgtgagccactgcgcccagccaactacagcaactggagacaagccttctgttacagaagagtccagcgtctgtgtgttcatggaagctggcagcaaaacaggcagaagatagactccactccccttccccttccagtgtcatgagagtgagggccaatcgcagaacttaatctgtaccttgatcttagctacgaggggttgtgggatgcgtagggcttggtcatcactgttgctggatcttttttttttttttttttttttgagacggagcctccttctgttgcccacgttagagtacagcagtgccatctcagctcactgcaacctctgcctcccgggttcaagcgattctcctgcctcagcctcccaagtagctgggactacaggcacacaccaccacgcccggctaatttttgtatttttagtagagacagggtttcaccatgttggccaggatggtcttgatctcttgacttcatgatctgcccaccttggcctcccaaagttctgggattacaggcatgaaccactgccccggcctgttgttggattttttgattggcttttcttttgagaattctgccattgaaagaaagctcactggcataaagttggaatggatgcgaggtgccattctatcctctctactgcatctcctctctcttctggaggcaactgcctaggtcaggtcctttttaggtggactttcagatctagtccctatatgtgaaacctatatgtgtatataaatcccttgtttatgcaaattgagtacatgctatagacaccgtcctgttgcttatccatatgaagagattattccatacttttaatatttgtataatagcttgtgtctcataaattatttaactggtcttgatagtcatatagctattttccatttattttgctatcatcgtagcaatgaatacctgtgtatgtgtctattgaaagcagaagttgtcaaactttacatagtagcaatgaatgtatatgtgtgtgtgtgtgtctattgaaagcagaagttgtcaaactttacgtagtagcaatgaatgtgtgtgtgtgtgtgtgtgtgtgtgtgtgtgtctattgaaagcagaagttgtcaacctttttgtgtagaggaccatatggtttccattttaggctttgtgagtcatacggtctctcatagctgttcagctctgctattcaatcaggaaggctcctgtagacaatatacccgtgaatggtgtagtgagttctaatgaaactttatttacaagaggagactgaccaggtttggcctgggggccacagtgtgtagacccctggaaagatacatcctgagaagaaaaaaagaatatatgcaggaatgcttaactttgtgggttttctctcctcttgccctcactgactcaggatacacaaagacctatcaagctcacgcaaagcagaaattcagccgcttatggtccagcaagtctgtcactgagattcacctatactttgaggaggaagtcaagcaagaagaatgtgaccatttggaccgcctttttgctcccaaggaagctgggaaacagccacgtacagtgatcattcaaggaccacaaggaattggaaaaacgacactcctgatgaagctgatgatggcctggtcggacaacaagatctttcgggataggttcctgtacacgttctatttctgctgcagagaactgagggagttgccgccaacgagtttggctgacttgatttccagagagtggcctgaccccgctgctcctataacagagatcgtgtctcaaccggagagactcttgttcgtcatcgacagcttcgaagagctgcagggcggcttgaacgaacccgattcggatctgtgtggtgacttgatggagaaacggccggtgcaggtgcttctgagcagtttgctgaggaagaagatgctcccggaggcctccctgctcatcgctatcaaacccgtgtgcccgaaggagctccgggatcaggtgacgatctcagaaatctaccagccccggggattcaacgagagtgataggttagtgtatttctgctgtttcttcaaagacccgaaaagagccatggaagccttcaatcttgtaagagaaagtgaacagctgttttccatatgccaaatcccgctcctctgctggatcctgtgtaccagtctgaagcaagagatgcagaaaggaaaagacctggccctgacctgccagagcactacctctgtgtactcctctttcgtctttaacctgttcacacctgagggtgccgagggcccgactccgcaaacccagcaccagctgaaggccctgtgctccctggctgcagagggtatgtggacagacacatttgagttttgtgaagacgacctccggagaaatggggttgttgacgctgacatccctgcgctgctgggcaccaagatacttctgaagtacggggagcgtgagagctcctacgtgttcctccacgtgtgtatccaggagttctgtgccgccttgttctatttgctcaagagccaccttgatcatcctcacccagctgtgagatgtgtacaggaattgctagttgccaattttgaaaaagcaaggagagcacattggatttttttggggtgttttctaactggccttttaaataaaaaggaacaagaaaaactggatgcgttttttggcttccaactgtcccaagagataaagcagcaaattcaccagtgcctgaagagcttaggggagcgtggcaatcctcagggacaggtggattccttggcgatattttactgtctctttgaaatgcaggatcctgcctttgtgaagcaggcagtgaacctcctccaagaagctaactttcatattattgacaacgtggacttggtggtttctgcctactgcttaaaatactgctccagcttgaggaaactctgtttttccgttcaaaatgtctttaagaaagaggatgaacacagctctacgtgagtccatcctatgactttttctctcttctcagaatctgtctgtattcccaagtgggttttgctgagggagtgtttaatataggatcatggttagaaactcattttttctgccacaaaacctcagctcacatcctggcccaacattttaggagctcttagactttgtctgtgagccttgcccttttgtggctgcagtggccccattacagaagggggaataataattgtattgtgaggagtgaatatgaggacctgtgtgaagagtgtttcctactttctcaagtattagctgatcagtactataatcgatatttttccatagcaccacactccctgtgtcttgacctctcagctgcaagttacctttgaaaacttagtctaaaaaatcatacagcccgggtgtggtggctcatgcctgtaaccctaccactgtgggaggctgaggcaggtggatcacttaaggtcaggagttcgagactagcctgaccaacatggtgacacctcgtctccactaaaaatacaaaaattagccgggtgtgtagcgcacacctgtaatcccagctacttgggaggctgaggccggagaatcacttgagcccgggaggcagaggttgcagtgagctgagatcgcaccactgccctccaggctgggtgacagtgagactctcatctccaaaaaaaaaaaaaaaaaaaaaaaaaacaaaacacaaatcatacaaattttcttcttgttctttttttttttttttctgaaatggagttttgctttgtcacccaggctggagtgcagtggcgagatcttggctcactgcaagctccgcctcccaggttcacgccattctcctgcctcggcctcccgaatagctgggactagaggggcccgccaccac[183 bp omitted]caacactttgagaagctgagcaggaggatgcttgaagccagggggctaagaccagcctgggaaaaatagcaggaccccacttctacaaaattttttttttaattagccaggtgtggtggcatgtgcctgtagcacagctacttgagggaggctgaagcaggaggattgcttgcttgagcccagaagtaagagactgcggtgagccatgatcgtgccactgtataacccagcctgggcaatagagcaagaccccatctcaaaaaccaaaagaatcatatgaggtggatcctattatcctgttacaggtgaggaaactggggcaaagaagtcaagtgagctggatcctatccagtcaaggatcctgtatttaggacatggagagttttagggctgagcctaggctgaagatgtcgacttaatggctgggctgtgctgcctcatcttttactgtaaaccagcctgaccaacatggcgaaaccccgtctctactaaaaatacaaaaattagccaggcatggtggcacgcacctattatcccagctactcaggaggctgaggcaggagaatcgcttgaacctgggaggtagaggttgcagtgagccaagattgtgccattgcactccagcctgggcaacaagagtgaaactccatctcaaaaaataaacctattttggatgtgagacagggtttctcagccttggcactggtgatgttttgggggctggctctcctgttacagtggggggctctcctgtgcattgtaggatgttcagaaacatccctggtctgtactcactagatgccagaagcacccctcccttaagctctaacatccaaaaaggcctctagacatccccaaatgtcccctggggggaaacgtcaccccaggttgagaaccactaacataaggtgacttacctgaagggtcccgttccttctgactgagggaggctctgcctcagacatcttctgtttgagaagacagcgtagtgcgtatatgtgttacaagtggctcgtgttgaccgcctgcctgtggaaagctcgtcctttcttgaccacaggtcggattacagcctcatctgttggcatcacatctgctctgtgctcaccaccagcgggcacctcagagagctccaggtgcaggacagcaccctcagcgagtcgacctttgtgacctggtgtaaccagctgaggcatcccagctgtcgccttcagaagcttgggtgagttgagaatcgacttcgactcgagtatgtcacggagatgacctattcatctcacctctagctttcagtcgaggctaactgcacaagcaaagaattaacatccagagcagttgctcaacctcagcacttacagacatctcatgcagatcattcttcatcataggggttgttctgtgcgttgtagggtgttaagatgcatccctggtctctaccctctagatcctaatagcatccccttgtccagataaccaaaatagtgtccagacactgccagctgtcccttgtgggggcaaaatctctcaagttgagaactactgagctgtgtcattgggctgtgaaatcagagaatgagttcatgatggatgatgagagacaaacacaggtgtgcaggctgtgctcccattagatgaaactcatccaaaattttctttgtttttgcagaataaataacgtttccttttctggccagagtgttctgctctttgaggtgctcttttatcagccagacttgaaatacctgagcttcaccctcacgaaactctctcgtgatgacatcaggtccctctgtgatgccttgaactacccagcaggcaacgtcaaagagctagcgtaagtctccgtttattgagaccactgattgggtttcagagaagactatagcctaagtctccgtttattgagaccactgattaggtttcagagaaaactatagcataagtctccgtttattgagaccactgattgggtttcagagaagactatagcgtaagtctccgtttattgagaccactgattgggtttcagagaagactatagcgtaagtctccgtttattgagaccactgattgggtttcagagaagactatagcgtaagtctccgtttattgagaccactgattgggtttcagagaagactatagcgtaagtctccgttattgagaccactgattgggtttcagagaagactatagcgtaagtctctgtttattgagaccactgattgggtttcagagaagactatagcgtaagtctctgtttattgagaccactgattgggtttcagagaagactatagcgtaagtctctgtttattgagaccactgattgggtttcagagaagactatagcgtaagtctccgtttattgagaccactgattgggtttcagagaagactatagcgtaagtctctgtttattgagaccactgattgggtttcagagaagactatgtatttctttttgtgttgggggagggggctgcatatttgaagacatccactttttccttctatgatttgtatgcaaacttagtttcctgagaacttggatagggaagttaaagtttcccaattgatgtagccatttcggaaaactgtgtgtattcagccttcatggattctggcagattatgtaacccaataattccacctggaggtgcacattcgacagagggacctgtctcagtttgctgaaagacaggcactaaagcattcccagcaggtgttcataatctctgagaagtggaaataccactgacagtaagttggataagaaacctgtggttacatgctcctgttccatgagaaagaacactctcggtcgtatgcaaaaacctggacaaatctcagacattgttgatggcaatgagccagactcaagagtacatcctatggctttattcctgtgaagttcaaagatggacaaggctctggtgttggaggttcgggcagtgtattcacacgttctcgcgctgctataaagacatacctgagactgggaatttataaataaaagaggtgtaattggcttatggttctgaaggatgtacaggcttctgcttctggggaggcctcaggaaacttacaatggtggcagaaggcaaagggaaagcaggcacgtcttacatgggggagcaggaagaagagagaagagggaggcgctacacagttccaagcaaccaggtcgcgtgaggactctgtcacaggaacagctctaggggatggtggtaaatcactagaaaccacccccatgattccgtcaccccccaggcccctcctccaacactgggattacagttcgacgtgagggttgggtggggacacagccgaaccatatcagacagcggttacttttgttaagatagtgaaggagaggggtacaggagaatgatgaacctgctctgtttcttgacctggatactggtaactcaagtgccttaaattcatgacagtgcgttggctggcacttaaccattgtgtgtactttccagtatgtatgttttaattcaagcatttttatttttgcaattaaataagggtttcctgtaaatacttaccctctacttaccttcattggtacccacacattcaaatacttctctatactagtctttgttggccatttttctgagcttgcatcaaccgaacacaaaaagacccaaacccttttttaaaaaataacaactttattgtgatatccacataccacaaaacatatacttttaaagtatgtacttcatatattttaagaaatacttttaaagtataactatgctttaaaatgtacagtttagtgatcctcatatatattcatgaggaagtacaaccatcatgactgattttagaatgttctcattacctcagaaagaaaccccatacccattagcattcactcctcactcccttatctctctggtccctgggaattactaacatactttcagtcctattggattttcctatcccaggcgtctcatgtaagttgaatcacatgtggtcttttgcgaatggcttactttcacttagcaaaatgttttcaaggtttatccaaattgtaccatgtatcagtacttcattccttttcttggctaaatagtattccactgtgtagatattccccattttgttcttctagtcctctagtgatgaacacttgggttgttaccaccttttagctattctgaatagtgctctatgaacactcatgtgtgaacacctgctttcaatccttttggacttgtaaccaggagtagacttgctaggtcatatagtaaatccatatttaactgttagagaaaccaccaagttattttcctcagtgactgcacaattctgtattcctaccagcaatgtatgagagttctaatttctccacatctttgcttattttttacttatttacttatattttattattacttatatttacttattttttattatacccatcctagtagatgtgaaggagcatctcattgtggttttgatttgcttttcctgaatgactaatgatgagcatcttttcctgtgctttttgatcatttctatatcttctttggagaaatatatattcaagtccttcacacatttttaaaaacttttattttacattcaggggtacaggtttttaaacatttaaaaattttaacatttaaacaacattttaaaaaacttttattttacattcaggggtacaggtttattataaaagtaaatggcacgtcatggaagtttggtgtacaaattatttcgtcacccgttaataagcatagtacctgataggtagatttttcttccccaccttcttcccaccctctgctctcaagtaggccctggtgtctgttgtccttttcttcatgtctatatgtactcagtgtttagcgtccacttataagtgagaacatgtgatatttggatttatgttcctgtgttagtttgctaaggataatggcctccagctccatccatgttgctacaaaggacatcatcttactcttttttatggctgcatagtattccatggtgtatatgtatcacattttctttatctagcccactgttgatgggtatttaggtgaatagtgctgtgatgagcatacaagtgcaggtgtctttatagtacaatgatttatattcctttgggtatatacccaataatgggattgctgggtttgatggtagttgtgtttgaagttctttcagaaattgccaaactgctttccataatggctgaactaatttacattcctacaaaaatgtgtaagtgtacacttttctctgcaacctcaccagcatatattatttcttgactttttttaataatagccattctgacctgtgtgagatggtatctcattgcagttttgatatgcatttttctaatgattaatgagcatttcttcatatggttgttggcaacacctttgcacatttttaattggattttttgcctttttgtcaagttgtaagtgttctttatgttttctgattacaagttatatacgagacgtactttgtgaatattttttgccattctgtgagttgtcgtttcactttcttaatggtgtcctttgaagcacaaaagcttctaatctgatgagatgcactttatttttttcttttgtctcatgtgcttttggtgcaattgctacgaaaccattgcctaacccaaattcattaagattaacttctttgttttcttttctttttttttcccccaaatttgagatgagtctcactctgtcacccaggctggagtgcagtggtacaatctcagttcactaaaacctccgcctcctgggttcaagtgattcttctgcctcagcctcctgagtagctgggactacaggtgcccaccaccatgcccagctaatttttgtatttttagtagagatggggtttcaccatgctggtcaggatggccttgatctcttgacctcatgttccgccctccttggcctcccaaagtgctggaattacaggcttgagccaccacgcccggccgcaccaacctatatcttaaatctagaaagaacattaaaagcatgcatggcctcagagccctgctgcagaggcgtgaggagccatggactcggtgacttgccaattccacatttatttctggacaactcccataatggctttcatctttattctgttgtctctgagcttattttttgtggcaaccagaggtaaggagagtggttgaggtaatagaaaaccacacagttaaaccacacagttgtgaggcaacacaaatcaactcaagccaccaaaaaaggagtcctaggggactcgggttcaaggcttcttccatgttctttgaggagatattacttgagcagagacctgaatgataaagatgcatctaaccacaggccagaaaaagagcattccacttggcgggcacacatgcaaaatagcccaagttgagtaaaggagccactagacacgagtttggggaggatcaaacatgaataatatcttagagaatgaaacctgtgttgtcaagcaactgaaaaagaaccagggtggctgggacatggggacttgggaatgggtaggacccttgtggatcatgttgtatattttgggattttctccaagtgcagtgagataagttactgggggaggctaagccaagcatgcatataactgacactgtgcgtctcaggttggctgtctctgtaccccagagaccgtaagccaagcatgcatataactgagacggtgcatctcaggttggctgtctctgtaccccagagaccataagccaagcatgcatataactgagacggtgcatctcaggttggctgtctctgtaccccagagaccataagccaagcatgcatataactgagacagtgcatatcaggttggctgtctctgtaccccggaggccataagtcaagcatgcatataacagatggtgcgtctcaggttggctgtctctgtaccccagagaccgtaagccaagtgtgcatgtaactgagactgtgtctcaggttggctgtctctgtaccctagagactgtaagccaagcatgcatataactgagactgtgtgtctcaggttggctgtctctgtaccccagagaccgtaagccaagcatacgtataactgagatggtgcatctcaggttggctgtctctgtaccccagagaccgtaagccaagcatgcatataactgagactgtgcatctcaggttggctgtctctgtaccccagagactgggttgacagggatcaagaacagggttgggaggcagtgagcctctcaaggacagcaaatgtgggcttcccgactctgacaggattggcaagaggaatgagtccaggaactagaaaccaacagaatgtgacattttccctttcctgcaggctggtaaattgtcacctctcacccattgattgtgaagtccttgctggccttctaaccaacaacaagaagctgacgtatctgaatgtatcctgcaaccagttagacacaggcgtgccccttttgtgtgaagccctgtgcagcccagacacggtcctggtatacctgatgtgagtggatgttgggggtgcctactgtggagggccatggcggcagttcaaacctgggcctattgatgacagtctgctcattgatggaggccacatagcggaggtttaaaagctcacgcttaagaatcagaaaagacttgagttctagttcaggatttatcacgtatatactgtcttcttaagcaaaatatttaacttagaagcagaggaaaatcctgtcttagaggtcttatggctatcaagtgagactgtctatacagaacacgtactgtgtttcaaagctgttaggttgggttaatgcacctgcaacacacatggtacttcccgtgttgataacggttatttcgagcatgtagaatagacttggtgggtactcaggacagtagcggggaaaaatgtctatgggcctcttgaccccagttaatactataatacatgtgatgttcttgcagtaataggatgagaagaggctattcaagccagttttagggtacgtaaaacacagaaggaagacagatgagtaagtgttaaaggccaattgatttacctattaatggaattctaatacctttaggtgatacttatacaaaaggggagaggacaggagaatatatatgcatttgtgtctttttttttttttttgagttttgagttttgctcttgttgcccaggctagagtgcagtggcatgatcttggcttatcgcaacctctgcctcctgggttcaagcaattcccctgcctcagtctcccaagtagctgagattacaggcatgcgccaccatgcctggctaattttgtatttttagtagagatggggtttctccacgttggtcaggctggtctcgagtgtgtctattttttaaatacacaaatatcactggaagaaatagtattataatataggctgcctgtgagaaatagaactgagaagctgggagataggggaggatggagatttttccctctttatacttttgggcattttgaaatatgaacaacatgaaagtaagagtattctgaaaatgtcaagaaaatgagaggatttatacctcgagctaaaatagagggacagggacaggacttaacctcccacctaaaacaaccaaaaataaccaactaaataaaacaactgtttaagacttcagacatcaggcaatgaaggacagtggtgcctgagtgataagggacaaacaggtgagtcctagaattgtcccaggtaactatctggagagagatttcagg[133 bp omitted]tcgagggaagctgaggctggagaatcgcttgaacctgggaggcagaggttgcagtgagccgagatcgcaccaccacacttcagcctgggtgaaagagcaagactgtctcaaaaaaaaacaaaaaataaaccaaaaaaaaaacaaaaaacaacaaagtccacaaatgcctggatatgccagaaaattgagatccgtgagagaagcaagctgggtgaggcctccgtggaaatgcagatcttgtgtctgtcaacaggaagcagttgcccgttctgtcctagcctgttggatttccatgtgggaatgcggctcattattgccagatatcccagttttcaacagaggttgaaatctagattttacatacaattttactgatggttatatattgccaactgattttgttaaacataaaaatgccaggaaatctaaatatccgtaggccatatgtggttcgttcatcactagcttgcaccgtctgcttttttgtttttctctactccacacttttttttcaaagtcaacatggatccttaaaaaaaaaaaattcataaactggctgggattggaggctcacacctatattcccaacactttgggacgtcaaggcaggtgaattgtttgagcccaggagttcaagaccagcctgggcaccatgatgaaaccctttcttgacaaaaaaatacaaaaattagcttggtgtggtggcacgcacctgtagtctcagctactcagaagactgaggtgctgaggtgggaggatcccttgagccagggaggtagaggctgcagtgagctgtgatcatgccactgcactccagcctaggtgacagagccataccctgtctccaaaaaaaaaaaagttttgaacctactgtgattttaaagaataatgaaattgaaaaagttggggattctacacatgaggtaatcaatacactttaccagtccctgagggagcggtctcagaaggtccatgtcttgtccaaggacatcatcagatgaagaattagaaccaaaattaaagccctgttagagtattagctatgccatattacacgatactttttccttctgcattaccctcttattttctaattcttctatcatgcaactaagaagaaatgagagggccggacgcggtggctcacgccttgtaatcccagcactttgggaggccgaggtgggcagatcacctgaggtccggagttcgagactagcctggctaacatggtgaaaccccgtctctactaaaaatgcaaaaattagcgagatgtggttgtgggtgcctgtaatctcagctacttgggaggctaaggcaagagaatcacttgaacctgggaggtggaggttgcagtgagccaagatcgcgccgttgcattccagcccgggcgacgacagcaaaactccatctcaaaagaataaatgagaggaggtgttttcagataatccagaacttcatctcagctggggagtttgtaagattatagaaatattaccctgaatgtgaaattaagcaaatctccctgagacaccacgtccctcttcactctccttctcgtgtttttgtccccataggttggctttctgccacctcagcgagcagtgctgcgaatacatctctgaaatgcttctgcgtaacaagagcgtgcgctatctagacctcagtgccaatgtcctgaaggacgaaggactgaaaactctctgcgaggccttgaaacatccggactgctgcctggattcactgtggtaggctttttgctgtttctttgaagaccaagccgtcttttcaagggcatgcactgctgagaatggggcatctggaattgaggaaggctgtagtgtctgtgcctgggcatgtgaaggtttaaaaaatacttgcttcagattcttgtcgagacgttcatgtaaacaaatcagcaccctgacttctgtggcatggatttaatatgttgcaaagagttctccagtggcatataggtagaggactgagagagccggaattaggtcgggacctgaggggcaatttcatggcgaagatgatatttggtgtgtgttctacaaaatgaatgcacttcatcaggtgcaaaaataaagccaaaattccaggtagaagggtaaaacgtgaaggtgggagatccaaaaatacacgtgagaattaatgtgtgtaacagagaatgctttagaagaagacaaagggtagcatgagatgagccagaaaggagatggtgaaaagacttaatttcatgttatcaaatagagaaatatctgggtaacccctgtagcggcggtggcagtgtttttagaattaccagttaggataacatgttgttatgtattttccctgaaaaatacagaggcttctgaaatctggcagcgtgatttttacctaatccattaggaaatcagtttaggattttgtattcctcacttgaagagtatgttaaataacataacaaaaacaccagatgcattctttctctcccagtagtgcgttaggctatctgggccaatcgttggcactgaaagacaccaaaaacatcagatacaatattaagaaaaaatttaaaagcatctagaagctaaacagaaataatcttttttttttttttttggagacagaagagtctcgctctgtcagcccacgctgaagtacagtggcacaatctcggctcactgcaa[247 bp omitted]agtagatagcacttaaggctatccaaaactccttaagacgtattaaaaaaacacaacataaccttaaactagtactgaacagatgcctgaaagaaacaagagcaaattgtctcaggaggtaggtaataggatgacatgatccttgacctcagcttattcctaaaaggattttttaaggtcagtaaataccacacagttaaaataacccaacccacaaggaaataaagctcattgagccaaggacaagtcaaaatacaaacagctaccaaactatctaattatctataaagctattatacttactatgtttacagaaaaataacaagtttgaatcttagggaaaaggagatgaaatgagcaaataatacaactagaaattataaatataataactgactatatggggtgaatagtagattagacataattaaagaaaaaattagtaaaatggaagataggttacaattacctagaaagcagcatgaaaacagaaaaataggtaaatcatagaagagggtataagacttagatgattaagatgttctaacacacttactgggaatcgcggaaagagaaaatattttaagaagactgaaatttttctgtaaccaatgaaagattccaattcagattcaagcatccaaataagcgcttaacaggataaatagtggagaaactgcagaacaccagatataaagatgttggtctgtaaagatttaacaaggggctgggagcttggggcgggggaaagtgatatctacaagaaaggagacagacttgggtgaagagtaatagtggaaaccagagggcagtacagtgagatattcagtatggcggggagacgggagggtggattgtcaacctagaattctatagccaccaaaaactatcaagaatgaggataaaaacacattttcaaataaataccaagtttcttaccaccagatccttcctaaaagtaattctaaagactgttccttagacagaagtaaatcattccagatggaagagagatagagcaaagagaggggtagatctctggataaatctaaacaaaatgtggattgtgtataaaaataataccatcttgaagatttaatggaaaaaatatacaacagccataacaaaatataaaggggtaaattaaggtgaatactcaaattagcagaaaagaggagacagaatgattaaaaaattcccgatccaaaaaagaacaaggaaacaaaaattgaacaggtaagaaaatatgaaacaagatatatatttgaattcaaatatgctagtaattaaacgaacagattaaatgtttcagctaaaagattgccatattaaaacgtaactaatgtttataagttacttattaaaacgtgaggttgtggttgtacaacattgtgaactgtagtaagtgccactgaactgttcactttaatatagttaatcttaagtaaattttacctcaataaaatgatgaaaatgaaaggatagaaaaaaagaccacgcaaatattaaaaggaagcttacgcaactgtatgaatcagacaaaatagaatttaagacaaagtattattcggttcatgctaatttttaaattatcttcctactcagttgaactttaaatcttacaaggtgaacataattacttcccatatagagtccaggaatctaagagaaatcataatggaaattagaacatatgttgaaatgaaaaaggaatatactttgcaacaaactcagatggagctgtagtgcatgtatatattttaaaaggaatctaaagaataatgaacttaaggatttttttaatggtaaaataaaccccctaaaggatggaaggaaataaaaataaggacagaaactaatgaaacaaaaatcacaatggaaaagatcagaaacctgcagggtggttcttggaaaaaacagtttttgttaatgccatcctatagaatataatgcaagccacacatgtaatattaaattttcaagtagccatattaaaagtgatgtaatatttgaaagtaattttataagtaaatatttgaaactaattttaataatatagtttatttagccatatatcaaacatcacttcaatatgtaatcagtacaaaaaattactaatgagagattttacttttttgtattaactctctaaggttcactatgtattttatactatggcacatctagattcagacaagctacattccaagtgctcagtggtcacacgtggctggctatcacactgaagagtgcaggtctatgtcaagaatgggaaaagaaacattactacagatgctacagatattaaaaagattacatatgagcaactttacacaataaacttgaaaatttagatattttcaagactcaataagcttctaaaatgatagaacctaaatgtactcaagacaaaagaaaaatgaatcagtcaaatctttttatatagaaaattccaggcttagaagccttcattggtgattcttaccagacattcaaagaataaataattccactcttacatcagctttttcaggatcagaagaggagaaactccccaccattttttgtggctagcataatcttgatgccagaaaccaataagaattttattggttgtaatataatccttacaatttttgtaagaaagcagaattaaaggctagtgtcattcatgaaatgcaaaaacactgaacagaatattagcaagcagaatccataaatgtattaaaagaataaacataatgactaagttgggcttatccccaaaatgtaaagttgctttaacattaaaaagattagtaaaaaaatcaatgtaaatcactttactggttaaaaataaaaatcatgatctaaaatgcagaaaagtttgaattaagacatacaattcttgaaaaactatttgggaacttccttgatgatctaaagaatatgttcaaaaaaatctaaagcaaacatttgtctaatgatgagagaaaagctttctcttcaatatcatgaaaaagataagaacggtggctataatcacttctagtcaacagtgtcctgaaaatcttagcaaatgcttcaaggtaagaaaaacactaaacctgtaatctttgaagaaacacctaattctatacagatgatttgaatgtacatagaaaaatccaagaaaatctgtagctaagttatcagaattagtctaacaagcttgcttgaaacaatatatcaaaaacagttactgatataccaacaagaagtaataagctagtggaattaaataaaagtaccttttacagtaacataaaaaagaaattacctagaaatagctactgtgatatatgtgagacttttatagagaatatgatcaaattatggtataaaacaatgttatattcaaagattgaaatattcagtatctaaaaagtcagttttctgtaagttgaattcatttgctttcatgaaatcccagtgaaaatgcgatgtttttgtttggtgattgagttgaacttgaaaagtaaattttaaaatgtgtatggaacttgcaagaggccaagaatacctaagaaacacctaaaatataaaaagtgggccaggcgcggtggctcacgcctgtaatctcagcactttgggaggctcaggtgggtggatcacctgaggtcaggagttcaagaccagcttgaccaacatagtgaaaccccgtctctactgaaaaaaaaaaaaatacagaattagctgggtatgatggtggatgcctgtaataccagctactcaggaggctgaggcaggagaatcacctgaacccgtgaggcagaggttgcagtgagctgagattgtgccgttgcattccagcctggacaacaggagtgaaactccgtctcaaataaaaataatgtaggaactcttgctctaaatgtgtcatctaaagttttagaaattaaaaaagcatgagattcacacagggataagcagacagaccagagacacagaatagagatctcagaaacagactgatccacgtgtgttcagatgtcgcatcatggaatagcgtatcactggtgcagagagaggatagacctccaacaaacgatgctgagacaattcagttgtccctccatatccataggaggttggctacagatttcccctgaggagtccaaaatctgtagatgctcaagttcctaatgtaaaatggcatagtgtgtgttttgagacagtctctcactttgtcgcccaggctggagtgcagtggtgcgatctcagctcactgcaatctctgcttcccgagttcaagtgattcttgtgcctcaacctcctgggtagctgggactacaggcacgcatcgccatgcccggctaattttttgtattttttgtgttttttttagtagagatgagggtttcaccattttggccaggctggtctggaacttctgacctcaggtgatccacccacctcagcctcccgaactgctgggattacacgcatgagccaccgcatctggcctatatagtgtttgcatataatgtacaggcatcttcccataatactgtaaatcatctctaagttactgtgatatgtaatacaatgtaaatgttgtgtgaacagttgttatactctattggttttttcgtttgtattttttagtgttgcgtgttatgtgttattgttttaattcttcaataatttcaatctgccactagttgaatctgtggatatggaggactgacggtgcctatccacatgaatgacaaaggctgtcgtgctttggtgtctcttttcctgatattagactgaggtgtaatagcctttaagcatggtacccttactcctttgcagtttggtaaaatgttttatcactgctgctggctgtgaagacctcgcctctgctctcatcagcaatcaaaacctgaagattctgcaaattgggtgcaatgaaatcggagatgtgggtgtgcagctgttgtgtcgggctctgacgcatacggattgccgcttagagattcttgggtgggtatcgccaagctcctggttatgttttcatgagtggcaaagacggaaaatggatgggaagaaagagaaagatgaaaactccaacaggaccacatagcagctagctgtggttgcatcatgaaccagtgtaaaacttcagggcttaaggcaatgagaagttagattgctgctggctctgcttgtctgggcaggcgtcactgacctcagccaggtgtgcttaggaagctgtggttaactgagggattggctggtttgggttgaccttgctatatggtatggaggttggctggctgggttggctgtccccttggggatgacaggtgtaactgggccacgtctcattatctaactggttggcctgggctcattgacatggcatctgtatcagtttgccagggtttaaaaagtagcatggactgggtggcttaggtaatgaatttatcacttcacggttatggaggctgaaagtctgagatcaaagtgtcagcagagttggctccttctgaaggccatgagggagaatctgcttcaggcccttcttgtcttgtcgataaccatctgtcttctccctgtgtcttcatgttctcttccctctgtgtgtgtgtgtctaaatttcctcttataagaacaccagtcatatgattagaatccccccagtgtcctcattttagcttaattgcctctataaagaccttgtatccaaatatgatcacattttggggtactggggtttaggacttcaacgtataaattttggcagggacagaaatgagcccatagcagcatctcaggagttcaagagatgaagtatagaaaacatccaagatcaccaggtgtgatagcttagtcctgcagtcccagcactaaaggagcctgaggcaagccaatagcttgaggctaggagttcaagaacaggctgggcaacatggtaaaaccccatctccataaaaattagccaggcgtggtgcatgcctgtagccccagttactcaggaggctgaggaaggaaaattgctagaacccaggaggtcaaggctgcaatgagccatgatcatgccactgcacttcagccgggatgacagaaaccccatctccacaaaaattagcccgcaggcgtggtgcatgcctgtagtcccagctactcaggaggctgaggcaggaaaattgctagaacccagcaggtcaaggctgcagtgagccatggtcatgctgctgcacttcagccaggatgacagagaccccatctccaaagaagaaaaacacccaaaatggtggctcagaactctcctaatcttgcttccattgttatctgagacggcttcatacctttttttggataatatgttatattatccaaagcaaggtatgaagccggaaatagactctgttagtggaatgagctgcaaagtcacattgctgtgggcagggatacagagaagaatggacacttatggctacttttaccacctacccacagacgcgtgatctgaggtcgtaaacactggactgtgagagattgcacttgaggcaatggggtgtgcctcaactagacgtctagctcacatcccatcctacctccaccctgaggctggggccgcatcttaccatgtgtctttttattgcaggttggaagaatgtgggttaacgagcacctgctgtaaggatctcgcgtctgttctcacctgcagtaagaccctgcagcagctcaacctgaccttgaacaccttggaccacacaggggtggttgtactctgtgaggccctgagacacccagagtgtgccctgcaggtgctcgggtgagctggggtctgttgtgctctatgggcagagtgctccgggctaagaagggattggctgggacctgcagtgtaatcacgttgcatttaaaatgcaaatgatgttccttgtctcagggttgttgcaggagtaagaaccaagcaggtgagtataaaactcttaccacagtaagtggtgaacagtgaatgtccaacaaatggaaacacttgtgaagtggcctcattgtctggggtaacacccgaggttcattgtcccagggccgtggagatccaaggacgcagagatccaaggacgcagatacacaaagagtgaggttaagagcagaagtttaataggcaaaagaaagaagagctgtctgctacagagaggggtctcggaaaaatggattgcccgatccatggtgaaatgcagagggttttatagacgagctggtgggaggtgtggtgtctgatctacatagggcatgaaaaactggttaggaccaggtgtgccgtttgcatagggtgtgaatttctggcagcccccaccccagtcttttattaagcaggcaggttctctgcctgagctgcactatgttgcccatttctttcttactgtacccatgctaataaaaaagggaagatggtgcttccatggtgaacaggcctggcccccaggtagctcttttcactggcgcagctgctggcattccccccatgcaatcttcgcgctcccttatttatgtttgcagctcagtttttcaggatgctctttgttagaaaagaaatgatttcttgggctggtttttgttagaagggaagctctgctgaggacttttgccctcactatctgcctaaataattttttacctcctatatcacttattattataatacaaattatgatacatgtttatattttaaatatttatgtgtaaatacaagttatatgtatattcataagtataacatttataaatagaaacttatataaacataatttatattttaatttgttatatttataattacatataatcccacaaacattattttactagataactatagagtccttaacatttttctcattcattttcccctactgttttcaaaccaatatgagatgaaggtaatcataggcagttattaggctgttcatttccagaaaagggaaatataatgggttaaaactgttataactctaacgctaaagaacattcactgatttttttttttccattttgtgaagatacaggtttgttttcttgaagtccatccttataaatctccacctggaaaggctgagtgcttggcattgtttctttctcattttaatgtttgctaaagattcagaatgtagactaccaaagtagacacgtgattaaggggaaggactcaaattgtctgcattctgagtcacggaggtctgtgtttgtctcctagccttgccatgtttggccctgtaagccagggtaaggcatttgtcctctttgattatcagcctcctatctacaaaatagggatgattatttggcatggtaattatgaaagtatgcatcagataatgtgataactatggcagaactaaataagtgagttttcatcttcctccagcccctaccatagatagtctcacaaagatgtgtattaagatacatagttgtgctaaagaacatagcttaccccaacagtgtgggacagttgcacgcaaacagatgccaaatggagatgagagatattatacgtaaaaggaaggaccaagacacggtgatacttaatccttctgattcaaagcaatgatacaacgtatgggggctccagaaacaaattgcttgaatttgtatccagactaccactttctggttttgtgaccttaacattgttctcattgtcttcatcacaagtcgggacaattatgctacctcataaggcagttgtgaacatttaatgagataggcatgtaaaaagccttagcagagggccagggcccaggtactcggataatggaaactattaactttatctttgaaaaagtaaaaatagcttcagtctttctccctaactcccactgacttcttgttgcaaatccaaatgtttgtgtggagttcatgccttctattaccaattctggacatttatttatgtccagtgacatattggagccagctcctacaagctggtgagagccacgtgtgtgtgtgtgtgtgtgtgtgtgtgtgtacctgtctttgtaactctgtttagtgacagcaagtgggcagctcaaaattggccatgattgccttggagaatttacaccacagaaattggcaaagctataaattgggactttatttattttctggggatccaggggtaacatttatcagcataccgctgcatttgatgtgtatgtctttcctcttggaggtaacaccagggtttcctaggcttgtcctgggatgaattagggagaaagatgagctgcagaaaagggaaaaagtatgtgaattaaaaatagaacctcttaaaatattttaccaggctgagaaaaactgattttgatgaggaaacccaggcacttctgacggctgaggaagagagaaatcctaacctgaccatcacagacgactgtgacacaatcacaagggtagagatctgattgcgaggaacctgggctctgactcgaacacctgcaaaggacagggactgggaccgttacttacatgacactgcacccaggagatacaaatcattgatactctgagttgtgagatttctggcaccccattcatagatttgatatgatacacgtggtttttatgtgctctgtggccttggatgagtcactgaaaggccttcatggtctctcggtctcacaaggacctcttaacccctcaataaagtgttacatttctaaacattggaaattctttttttgcctttttttatttgtataaatttaaggggtacgagtatggttttgttacatgtatatattgtgtgggaaaatctgggcttttagtatacctatcacacagatagtgtacattgtacccattaggtcagttctcaccctgcacctccctctcaccctcctgagcctccaatgtctactattccacactttttttttttttttgagatagattttcgctcttgttgcccaggctggagtgcaatggtgcaatcgcggctcaccacaacctccgcctcctgggttcaagcgatttctcctgcctcagcctcctgagtagctgggattacaggcatgcaccaccacgcctggctaattttgtatttttttttttttttttttaagtagagatggggtttctccatgttggtcaggctggtcttgaactcccgacctcaggtgatccacctgcctcagcctttcacagtggtgggattacaggcgtgagccactgcatccagccactctttatatattatttagctctcacatacaagtaagaacatgcattatttgacttagtttctgagttatctcacttaagatcatggcttgagttccatccatgttgctgcaaaagacatgattttattctttttatggctgaataggattccactgtctataaatcatgttttcttgatccactcatctgctggtggacacttatgttgatcccatgactttgctattgtggagagtgctccagtaaacacatggatgcaggtatctttttagtatgatttctcttgctttggatagaactcggtagtgaggttgccggacaaaatggtagctctatgtttagttctttgggaaatctccatactgcctggaaaatcttgaaacagtgtttgctactgatgaatgactggaataggagtgcaggttgaagaaactgtggccccctccccgtgttgacttggaaagacgctggccacactgaaagcactagaaaggctggtctgacttgggcacccttctttctgccagtcctactaggattccaggttgggctcctgatctgttcttgcctgatgaaagcaccttttttattggtacataatagtggtatatattttggggttcatgtgaatgtttgggtaatttccatggcattgctaatattacctctcctcacggtctttgcctctcatattcttccccaaactcccctctggctctcctttcctcattgggcctcttgagttctgaggctaccctgtctcccctacctttgaataaagatctcttgggagtgggagctgaaaggaaattttaggaatgggggtatttcacttctgaatttttttttttttttttttggagacagatcctcgctctgtcacccaggctagattgcagtggtgcgatctttgcccactgcaccctccacctcccgggttcaagcaattctcctgcctcagcctcccgagtagctgggattacaggcgcgtgccaccacacatggctaattttactatttttagtagagacggggtttcaccatgttggtcaggctggtctagaactcctgacctcatgatctgtcctccttggcctcccaaagtgctgcaattacaggcgtgagccaccgtgcccggcctcacttctgaacttctgtgccactgatttaggagtgaagattgagaaaatcagcaacctgaatgtccatcaatgggtgaatggataaacaaaatgtggcatataaataaaatgaaatactgagtcttcaaaaggaaggacatgctgatatatgacacaacatagatgaaccttgaggatattatgctaaatgaaataagccagtcacaaaagagcaaataccgtacattctccttctatgaggtacttacagtagccaaattcatagaggcaaaaagtaaaatgttggctaccagaggccaggggaaggaggagaagatggagttatttaatgagcatagagtttgttttgcaagatggaaaagttctggagatggatggtggtgatggttgtaaaatgtgagtgtgctcaaggccacagggatgtacactttaaatgggttaaaatggtaaaattttgttacgcatgttttaccacaataaaaagaaagtggggaggctgggtgcagtggctcatgcctgtattcccagcactttgggaggccgaggcaggtggatcacctgaggtcaggagtttgagaccagcctgaccaacgtggaaaaatcctgtctttattaaaaatacaaaaaattagccgggcgtggtggtggtgcatgcctggaatcccagctactcgggaggctgaggcaggagaatcgcttgaacccaggaggcagaggttgcagcaggcagagatcataccattgcactccagcctgggcaacaggagtgaaactccatctcaaaaaaagtgtggaaagaaaaataacaaacaggaaaatctgggaagtcatttagtctgtcatctgtaaagtggtaatgattaaggactatctattgcacctgggtgcaatagacgtgataaaatataaaagcagcttgaggaaccaaagaacctattctccagctaccttaattatgttcatgagatgtccatttccacccccagcaggaacattaacatttttctcctaacggttttccctccactaaaaatacaggtcagtagaaaagagggagaaggaagtgctgatagagaacgggtactgagctgcccagcacagtggtttacgcctgtaatcccagcacctcgggaggccaagtcaggaggatcgcttgagcccaggagttagagaccagcttgggcaacatagagagaccctacctctactatctatctatctatctatctatctatctatctatctatctatctatctatctatatctatctagaattattattattattattttttaattatctgggcgtggcgactcatgcctgtggtcccagctactcaggaggctggggaaggaagaccacttgatcctgggaggttgaggccgcagtgagccgcgatcacaccactacactctagtctgggtgacacagcaaggcactgtctgaaaaactttttttttttaatcacaaaaaaagaggtactaagctataaaaagtctaagttacaagtaaagaatcttaatgacagaattgaaggagattattcacccaagagctattaatacattgacaggtgcttaccacaagctgaatattttatatgttatttcaattcttgcaaaatctgaggttgatgctataagacccttcttgtaatgggaaaattggcctaaagggtacaagtaactgcttccaagctaagaagctgtcactctggctgccttcaccctgggaatccttttccacccaagttcattattcctggaattccatctgtctcttcttcagtccaaggatctcctgggctgtttcagcactctaccacctctgtctctcataacctgagctgtgcaccaagcttgactcacctcagccacacattagtcctgggcacatctagccaagcttttaagattgcatggttggccgggtgcagtggctcacgcctgtaatcccagcattttgggaggc[134 bp omitted]gaggcaggagaatcactggaacccaggaggtggaggttgcagtgagctgagattgcaccattgtgctccagcctgggcaacagagcgagactgtcttaaaaaaaaattgcaaggtggtgggtgaggaagtgagtgtcaaaaaagacagcaagcagggtgggtaaaaggagagggaggaaaggtaaatgaagctggagacacaaataatccgtctaccttcctcataagtataggcttgaagttagacaattggtcacaagctaattggtctgtcttggttcacgggcttcataatttggaggcagcctagaaaaaagttcagcagtcaaggtacactggaatcccttctatctcatctcttctcttttcctgaatcaccaattaccccttccaaaccccctccaagacctattatgggcccccccagtcctacaaagtaacattggcctgactgtacagtggatttgaaatcatctgtctactctaaaaaaatgttgctttaagatactttgatgtaattgaattctaggacaaacttagaaattgtagaataacaacaaaaaaaattcctaaattagtaattgagtagactaaatatgattgacttgagtattgattagtaaattgaaaatttagtaattgagaatttgtggatcaagcattaaacagaggatatccctgtgtttttgtctgttttttgagatgaagtctcgctctgtcaccagtctggagtacagtggcgcgatctcagctcactgcagcctctgcctcctgggttcaagcaattctcctgcctcagcctcctgagtagctgggactacaggtgcctgccaccatgcccagctaatttttatatttttagtagagacagggtttcaccatgttggccaggatggtctcaatctcttgaccttgtgatctgcccacctcggcctcctgaagtgctgggattacaggtgtgagccaccatgccaggccatccctggttttttgtttgttgttgttgttttttttctctgagacagagtctcgctctgtcaccaggctggaatgcagtggcatgatctctgctcactgcaacctccacctcccgggttcaagcaattcctctgactcagccttctgagtaagtgggactacaggtgcgcaccaccacacctggctaattttttttttgtattttagtagagacggggtttcaccatgttggccaggatggtctcaatctcctgacctcgtgatctgcctacctcggcctcccagagtgctgggattacaggtgtgagccaccgtgcccagcccatctctgttatttttaaagaaacaatggagaaatcttgggatagtctttatttatcttgtcagattatcagaaataacatggttggccaggtttggtggctcacgcctgtaatcccagcactctgggaggccaaggctggaggatcggttgagctcagaagtttgagaccagcctgggcaacatggcaaaacctcatctctactaaaaaaagttacatggtggcacacacctgtagtcccagctactcgggaggctgaagtggcaggatcccttgagcctgggaggcagaggttgcagtgagccgagatggtgccactgcactccagcctgggtgacagagtgagaccctgtctcaaaataaaatatggcccattttaatagctggtaactgaatatgaatcaatgagatgaagattaaggcaattaacctttgattttatttttaacctttattgccctgacaatattttctaaattagttcacatacgtctcccactctttctatcccagatttcatctacaaagggcagtaaagatatagaaaaaggaagagaatgaagtatttatttcaaggactctgggttttactatgtctaatagtgagaacatggatggatagaaggattatagccttcaacttattgaaagatcccatcaggtgttgtaaagtgggtcagatcttaaaatagaaaagttggatttataggccagtttgacttactatctctgtaatctgttgtaaagcattttcttttggtatctttgcttttaaatcagtaaagtaaggctatcctatcttacagggctttgatggggatttagaccctctaggaaggtgttttataagctatgaaatgctaaatggatctccagctattctgtaagactgcttctgatagcgtctgcttattgaataataaaatagtacaagaaagactcttggtgttagagcgggggagagaaaattacaacttaataagatcttattcttcatagagatttccatccatgacacatcgatttcacatatcctgtgcgggatacagttttatattttcaggtgagtaaagtacattttagaagtgttacacagccacagagctaacaaaggcagaagtgaaagccaaaattgggtctaatttaattacaaattatttctgtcctcatcattttgaagatgaggtaattaggtccagagaggggaagtgactgacccaaaagtaacaaaataaggaattatcctggggtgtaaagacagagtctgtggccggaggcagaccatatttctgtgcaaatggataggacagagtggtggtgagttcatggaggaaggacggaagaccacatcatt[138 bp omitted]ggtgaagccccatctctactaaaaataatacaaaaatcagctgggcatagtggtgtgtgcctgtaatcccagctactcgggaggctgaggaaggagaatcacttgaacccgggaggtggaggttgcagtgagccaagattgcaccactgcactccagcctggcaacagagcgagactctgtctcaaaaaagaaaacaacaaaactatttcagatggataaaataagcgaaagggaggtggtccttacgatggttttgtattaacctgaatattattcctgtaaacagggtcccattctacctccatgtcctgcacatctgcagaatagagaaggaagacttttactttctggagaaaatttatttcaagtctccttgagcagcaatcttaagtctcaacccatagcatccaatcctttgtgtattagagggtttacctctcttgtcctgcagctaactcaggttgacactttctatgcctcagagcctttatttttgtcttatcagggtacaggtgctggtagatgtggcagtgggtacttgtggaagatctggattcttatttcttcaagaaatatgtaaaatcaactgagcatgaaaatggagaactgttgaggacaatggaagttgagtagaacgggttaaagcagtatgttacagtatcatgtgcaacagtaccataagcaacggtaagaaaactcttaggattagccataaatttaagcagggttgaacatccttcagcatgttcagctatctggatacaagtgtggaatacgtagaacattggaaaaaggcttgtggttttaagtgcataggacaaagtgagaggggcaggcagagcatggaagatgtttagacaaatttgaggggctgtttggagtaccgtcagctaaatagataaactctaagcagggtgaagtatagcaaaaaggcagctgtcttcaggaactgagaagggtttggggtgttattctacttatgagccaaaaagcctgttcctgtttcatggaagctagcagaagatatgagactcctggcccagaaacaaataattttatcatccatgacaaaagcatgagtcagtatttcttgttgcttttaatcagttcctcatacttcccaagtctcacagctttgggtgccataaagggtccatgatagatgactgtacctgctgtagactggattaagagaagcatgctgagcttagggaatctgccgattttcaataagcagaacaagcctgctttttgtctggggtagaaagttaccttatccctcaagtttgctcagtgcaaacacaacctggcaaaagtccttggcaaaaaaacaaaaattaaaaaaaagaaatttaaaagtcagggtccaacattttatgcatacccataaagaatgtacaggggtgcttagggcccatgataaacagcctcttgctatagtatatcagtgagaatggaatctacagattaatctctggttagagtcagtcaggaagatatgaagtggttgttgaagaggcaaatgccaattaaaagtgaaactactaggccaggcatggtggctcacgcctgtaaacccagcagtttgggaagccgaggcgggtagatcacaaggtcaagagatcgagaccattttggccaacagggtgaaaccccatctctactaaaaatacaaaaagtagccgggtgtggtggcgcatgcctgtagtcccagctactcgggaggctgaggcaggagaattgcttgaactcaggaggcggaggttgcagtgagccgagatcgcaccactgcactccagcctgagcgacagagcgagagtgtcttaaaaaaaaaaaaaaaaaaaaaaaaaaactacaaaatagttggaatttctggagtttgagcatgaaggaggcttagatacggcagaagatactgtcgttgaagatgcagtcacacagggatgtccgatcttttggtttccctgggccacgttggaagaattgtcttgggccacacactaatgctggctgatgagctaaaaaaaaaaaaaaaaacaaaaacaaaacaaacaaaaaaaaagtctatgcatacgaaagtttatgaatttgtgttgggacctcattaaaagtgggcccaggctgtgggttggacaagcatggagattaaaattaggtgtaaggaatataggctgaacatcccaaatccaaaaatccagaatctagaatgttccttttgaacgctgagacgatgctcataggaaatgtttactggaacgtttccgaattcagaattttagattttgtgtgtccagccagtaagtataatgcaaatattccaaagtctgaaaaaaatgcaaagtccatgcatttcggataagggatactcaacttgtaccaccggaggggctgacggggggccaggagctaaagtcttttaactgaagtctaatttggcagtccggaagtggctcgaagaacaaggggtctaaatctaaagacacgaggatagaggctgagagggagacagaggggtgaagagaatggtcgcagagcagaaggtgaggaagagaccacccacccgattaactgctaggctcccgagacaagacaaccacgcccgaaagagctgcaagagaagcaatgtcctcagaggagatgcaggtttcagagagagggagattaaagggaccgtttcaacctattctctaaatataggtttgctggtttccaaagagcacagtgagaaggtttcgggtgaagaagggcaggagatggaataaactcagaaaagtacatcgtaatgaagagtgggagataggaatcaatccaggccaggtgcggtggctcacacctgtaatcccaacacttcgggaggccgaggcaggtggatcacttgaggccaggagttcaaaaccggcctggaaaacatggtgaaaccccatgtctactaaaaatacaaaagttagccaggcctggtggtacatgcctgtaatcccagctacttgggaggctgaggcagaagaaccacttgaactcgagaggtggaggttgcagtgagctgagatggtgccactacgctccagcctgggtgacagagtgagaccctgtctcaaaaaaaaaaaaaatcaatgcagagtctaatatttcttgggggagtcaatataagtgaagataaaggcatattaggagttctggatgtctatgtggtttaatcacagtataataattatggaattataaacacatcgatcccacttctcaatccatgagaaatgaggctttggactttcctgaggtatttttatatgctttgctttattgaattctctcaacacctccaagaattaaaaacattacaccaaggaggacatagacaagactgaaggcacagccaacttatgatcttggtaccagacacagtattacactaggattccagacctgggcgtgcaatgggcggcctccaacaaccgtgacaaagcctcctgcagggaacagctcatttgtccccacaaatggtgacattggagcgacacacaggccaggatgtcctggtggctttcccccaagatccatggtcaagccacgtggcatctaatccgtgggatcaccaccaccacttgtcttcaaggtcattaaaatcccacgcacacttgagtttcagacagagctccttctgtgaggtctgtatctcctctctcactacattgtgcaggtctttttgaagcctgcaaaataagaagtactgaagtttagaagcagtgaagaagtttagaagtaatttttaatttttaaggttcaggggaacacgtacaggtttgttacatgggtctactgtgtggcatgaagtttggtgtgtgaatgatcccatcacccaggtagtgagtatagcacctgaaagtactttaacccttgcctccttcctactctcctcctcctagtagtcccgtgtcttgtcaacaaatatatgtgtatatatgtatatacacacacatacacacacacatattcatatacatacacacatacacatatacgtattgtttgagacgcagtgtcactttgtcacccaggctggagtgcagtggcgtgatctcggctcactgcaccctccacctcctgggccccagcgattctcctgccttaggctcctgaatagctgggattataggcgcacaccaccacgccggctaatttttgtatttttagtagagatggggtttcaccatgttggccaggctggtctcgaactcctgacctcaggtgatctgcccacctcggcctcccaaagtgctggaattagaggcatgagccaccatgcctggcctactgtcaccatctttaaatccacatgtactgattgtttagctccaacttgtgagaacatgtggtatgtggttttctgttcctgcattagttcacttaggctaatagccctcagctgcgtccatgttgccacaaaggacatggtttcattcctttttagagcagtgtagtactccatggtgtatgtggaccacatgcatgtgtgtgttcctcacagcactgttcacaatagcattgacatggaaccaacctaggtgctcatcaacagcagactggatggaagcagtgaagtacaggcagggtgcagtgtaaagtggcaaactgatataaagcataataaaggtttagacaaaagtaattgccatttttgccattaaaagtaatggcggccaggcatggtggctcacacctgtaatcccagcactttgggaggctgaggcaggtgaattacctgaggtcggcagttctagaccagcctgaccaacatggagaaaccccatctctactaaaaataccaagttagctgggtgtggtggcacgtgcctgtaatccaggctactcgggaggctgaggcaagagaatcgcttgaacctgggaggcggagggtgcggtgagccgagatcacgccattgcactcctgtgtgggcaacaagagtgaaactccatctcaaaaaaaaagtaatggcaaaaaccattactttaaaaccactgcattaaaagtaatagcaaacacaattactttggcacctacctacagaaagactaacaaatgaagggtaacttttgtttacccttcgactgggacctcccaccaccctagccttacccacagatgtcagggagaagatttgatggcacgggaacccctttccatagagaaaaggcacaaccacaaaggtagaggatgagaaaaccatggcgcagatgacacaagggaccttgtgggcaggccagagtaactcaggccattttcactgtgtatgaataaatccaagtacttctcattaatctgcatctagcaatttttgaaaaataaaatctgagcgttctacaagaggaggcgagggtctgggcacccagtcagaagccccttctgcacacatgcatgatagacagcagagaagcttcatctttaacggttgctgtcccagaaccctttttaaaatgcaccactgaagtgtgaagttggcaacatcaaatctttaaaaggtgcagatcgtgactcacttcctaaagtaggcaaggttccttggcatctgggatgacttctgctgagatgtaccagtaacagctgttaactgcttacctttctccatgccccaactttttttttttttttttttttgagacagggtcttgctctgttacccaggctggagtgcatgatcatggctcactacagcctcaaactcctgggttcaggcagtcttcccacctcagcctcccaagttgctgggaacacaggtgtgtgccaccatgccaagccaattttttaaaatttttgtagagacaggatctgcctatgttgcccatgctggtcttgaactcctggcctcaagtgatcctcctgccttggcctctcaaagtgctggaattataggcatgagcaactgcagccaacctgcttacctttctgatttcctctcagaatactgaatggggtggaaagtgttctaattaaatgctcttctctcagtgcctcaaaggggcaacataaagcttggtgcaacctcagggcctttgcacatgctactgaaacatcctcagtacattccacccttcatctctagtcacctctcatgttcccttcctgatatagggactcctccttccagcctccttgggactcaggatcaatggtaccgcctctggcaagccccttgctattctggtcaccctcctgtcttatctcaacccagagtttctttcacagcattcatgacaacagagattgcttttatgtctcagacctgttatctcctggaggagaactcaagactctcaaggacaaggctcatgtccgtttgtttcccccctgtctaccatgccatggtgcttggcccagagtcggtattgaaaaagaagccacaagttaatggctatggagtgacacgtacagtaggtacaagaatgataaacagaagcaggctctcaaaatacccaaaagtctccaggactgcaccatccagtacggtagtcattagcgacatgtggctgttaagatttaattagtaggttgatgcaaaagtaattgccatttttgccactaaaagtgacagcaaaaaccattactttaaaaccactgcattaaaagtaatagcaaacaccaaaattactttgtaccaacctaataaaattaaaaatttatatttatattaaaataggctggtggccaggagcagtggctcacgcctgtaatcgcagcactttgggaggcgggccaacatggtgaaacccccgtgtctactaaaagtatgttaaaaaaaaaaaaaagaaagaaaagaaaaagaaaattagccaggcgtagtggcatgcacctgtagtcccagctactgggaaggctgagccaagagaatcacttgaaccaggatggggaggttgtagtgaactgagattgcgccactgcactccagcctgggtgacagagcaagactccatctcaaaaaagaaaagaaaaaacagtccgggcatggtggctcatgcctgtaatcccagcactttgagacgccgaggtgggtggatcacctgaggtcaggagttcaagaccagcctggccactacggtgaaacccccatctctacaaaaatacaaaaattagctgggcgtggtggtgggtgcctgtagctccagctactcgggaggctgaggcaggaaaattgcttaaacccgggaggtggaggttgcagtgaatcaagatgacacaactgcactctagcctgggtgacagagcgagacactgtctcaaaaaaggtgaaagaaaaaagaaaactactaattcagttcccagtcacactaaccatgtttcaagtgcccaatgatgagatgccgctcgtggctacacagcaggtgcacagcacagagatcactcccacccttactggaagttccgttggcctgcatggcctgaggaagccgagtgcaatggaaacctgacacatgctctagaagcctagtcaatctagccttgtccctgtatgttctcccctgcagaaaagtcagtgaggtttacccgagtttctgcagcctgcatgtcgactttttcaaagccttacatagcatcttgacaccatcagtatccaattcattgcctagaaggttcagattgaccaggctcttactgctgctgagaacagagaagagatgctggcagcaagcagttgtcagattgcatttcgccaacctaggggcgggtgggaagaaagcacaacagatagtcctctgagactgggaagttagaaaagagataccacatctgcaggaaaaa[141 bp omitted]aaaccccatttctattaaaatacaaaaattagccaggcatgttggcatgcatctgtagttccaggtactcaggaggctgaggcaggagaatcgcttgaacccgggaggtggaggttgcagtgagccgagatcacaccactgcactccagcctggcgacagcaagattctgtctcaaaaaaaaaaaaaaaaagggctgggcgcggtggctcacacctgtaatcccagcacttagggaggctgaggtgggtggatcacaaggtcaggagttcaacaccagcctcgacaagatggtgaaaccctgtctctactacaaaaaatacaaaaattagccaggcgtggtggtgggtgtctgtaatcccagctgcttgggaggctgag[132 bp omitted]tggagtacttactgcatgccgggcaccttttaaatactgacatataactcatctaacccatctatcaatcttatcaaaggtacatactattttaaactgtatttgatggaggaggaaacaaaaacttaacctgccagaatgtgaaacaaaccattttagtatacaagggatatgagtttattagatctttgaaagaactgaaatagcactattattccttatttacacttttttccatcttattctaaattcaacaatacaaaatttgaacatagggttggctagctactagaaacacaaagacaaaagtgagaaaatacattagatcagtttaacacatcagagatctccacctgagttcataaataactattacacgctggccaggcgcagtggctcatgtcagtaatcccaacactttgggagactgaggcaggcagatcacttgagcttaggagtttgagaccagactgggcaacatggtgaaacctcatttccataataaatacaaaaaaacagatgggtgtggtagcgtgcacctgttgtcccagctactcaggaggctgaggaggaaggattgcttgaggttgcactgagctgagatcgcaccactgcactccagcctgggtgacagagtgagaccccatcaaaacaaacaaaaaaccataaagcccttcttttagaaagaaaaaagtcagaatgagtctctctaaggaaatagttcagtaagttgcttcgttaactgatttttttgaagataaacttgattcagaatgcatttatgccaaactatcttaaatttggcactgcagataacgttaacctattcatgtttctttcaggcctatgagagaacaagtctagtttatgtttaaaccaataatttaatgtgtggtgtctatatagtagatttaacaatctctgaatagaggtttgaggtggctggtaaaccccaacaatgctggaggtggtttacaatttgagtcggttcatttgatactaacaaatcctaacactgtttctgaaaacatcactgagctaatggaaccattccctacatgagaaattgctatcatgtaagccacatttagcaaaaaatcctacggttcagagcaactcatcttagtctgcttagtacacgttgcatgatggttaacaacggtgaagtgaagattcacagtggggagcaggctgcgctcccctcaacttcccagcacctggcacccaccatgggcagattgggagagacaatattttcaatgtaccaaggatggtggtaacaagagtaaaacacttctctaaacgtgaaaaacttcaagcttatcatctagcaggagagtttttgtttttgtttttgttttttttttttttgagatggagtttcgctcttgtctcccaggctggagtgcaatggcacaatctcagctcactgcaacctctacctcccgggttcaagcgattctcctgcctcagcctcctgagtagctgggactacagatgcccacctatacacccagctaattttcgtatttttagtagagatggggtttccccatgttggccaggcttgtcttgagctcctgacctcaggtgatccgcccacctcgacctccccaaatgctgggattacaggtgtgagccactgctcccagctaatttttgtatttttagtagagacggggtttccccatgttggtcaggctgctctcgaactcctgacctcaggtgatccacccaccttggcctcccaaagtgctggggttacgggcgtgagccaccacacctgggtgagatttcttagatggcttgtccttactttgcctcactttctaacccccgatgggatccgatcatatctccccacccgcaagagtagagaaggaagactctgcaaggagaacagcatcaactcacccaagtgtgtgcaatgcacgatgtggtttcagagcctcacacagtagcttcactccatcatcctgaagatcattttctcccaaatccaagattttcacattatgattatggctgagggcattagccagctctccacagccctctcttgtgaaagaacaacctgacaaactgcaaaataaaaacatacaaaaggggggaaagtaattgcgtcccgaagctgtgctgtgtttacaactgcccatctcacgtccaaggaaaggagacaccctgaagccagacttttgtcccaagcctcgaaggaggagggtgcgagtcaggagggccgagacacctccaggtgctctatttacctgagatagaaagccgagggcacagcaacacagccctctccctcccacgccccccgcaggtgcatgaacgtgaagggcctctctgtggtggttaccccccagcacccagagttggcttggctatcacagtgcacgattctcagccttcaagctcgacagttgagctgaagataccaggaatctcccataacggcaggtctgaatttcccagaataaattactataccataataagttcaaaatagttaatccaggtgactatttggagaaaatatgggttgaggtggggagggatgaggagaggaaagacaaggaagcgacaggaggagaaagagtcat[138 bp omitted]tggtgaaaccccatctctactaaaaatacaagaattatccaggcgtggtggcgggtgcctgcaatcccagctacttgggaggctgaggcaggagaatagcttaaacccgggaggtggaggttgcagtgagccgagattgcaccattgtactccagcctgggcgacagagcaagagtctgtttaaaaaaaattttgactacgtgaagaacgtccatatggctaacccatcaaaggccaagtgtaagagaactgccaggctgataaatgatacatgcaaatcaaagacagtcagatttccctagagtttagacatggtggtcaaagggtacaaaaatctcagcaggaatataattgttgtttttttttttttttgagatctattccatggcatggcaaacatacttaatagaacattgtacctttcaaaattgctaacataataaatttcaaatattgtcaccacaaaaaattgttaagtatttgaggtgatggacacattaactaacttaattattccacattgtattcataaagtttgtacccccaaaacatatacagatggtaaatttacaataaaacgattaaagttttaaaaacaagaaagaattccctacaagtgacgaggggaaaaacaaaatgaaacaggttaaaaaaaaaatcagcaaattttatcaacaggtttttttaatctggaagtttttatcaatggttgtcagcatttgaaaacatactcaacttcattcttataaatgcagatgcaaatataaaactactttgtgtttacaaaggaagaggtatgacccacgggatgggcctcaaaataatcttagagggagaaattagttcaacca[140 bp omitted]ggtgaaaccccatctgtactaaaaaaaaaatacaaaaaattagccgggcatggtggcgggcacccgtagtcccagctacacgggaggctgagacaggagaatgacgtgaacccaggaggctgagcttgcagtgagctgagatcacaccactgcactccagcctgagtgacagaacaagactccatcttaaaaaaaaaaaaaaaatctagaaccaggaatcccatttgacccagcaatcccattactgagtgttggtgaagctttagatgaaaggagataggccataaatcaataattgttgaagttcgagcatggattgtaatatatgctcttctctctaaagtttcaaaatcccctggaagaataacaaatcccttgaccggccaggcacagtggctcacgtcttggtacatgctagaccgcacataaccagcactcagtaaaaactctgggctcagggtctctaatgggctgccctggtagaccacacttggcatgattgccacagctggtggctggaggaattgtgtgtcctgtgtgatgttggagagcaagcttggagtcttaaggaaaagacgagcactcagacaaaagatttctcagcaaagcaaatttacctctgcacagaggagtgcttctctttggcccgtcgccacgagagcacatagaacaaaggagaatgaaagtttttatccctgatgcaaatcctgaccccgtgccctttccccattggctggggtcggaccacacaatctcaactagacctgattggctaaacgtttgaactttttcttagataatgtgggcacttaagggagagaagggagagtaagggagagaggggagagggggaaaagtcgtctgcgatgagctggagagctagttttcttcccaaataaggaaaggaaggtgagctaatactgataagccactggtgctgttagcatgcctgggcacgtagtaaaggcagaaagaaagagaaggaaagggaaggggagcggtactgtggattgaagaagaaaggattgatcaggctatttgaagagaaaccttgtcatatcccacatgtgattgcacggggagagggctcctgggagcttatgtctggtttcctctggactctgtcccaagcccctttccctttgctgatctgccttgtgtcctttcaccctgatgaagtgtagcatgaatacgactatgggctggatcccgagtcctcccagtgaaacatcaaacccgggggctggtctcgaggtcccccagacacacacacattcacggtcctcccactttccccatcccacacccccgacaaaaccagaagctcctccatggcaaagagcttgtccacgcctcattcaaaccccatcaggaactcaggcattggtgggtcaattcccatggctctcctccatctgccaactcagagggagccaagaaaacttacttcaggctctgcaggttaccatctgggcgacccaaggcctcacacaggaacttgactccctcgtctctcaggctgttcttgctcagattcaggtgtgtcaggctcctgttctgcaggagagcatctgacaagtgcttgcaagcgggtgctgccagctggcaaaaccagagcctgcagggtgaaagccacagagatggacactcagggaagcagcccagacccaggctcctggaacagagcctcagggccccctccgagcctacacatgcagcagctccctggacgacaaggtctttctttttagctggacaccgacccaggctatggcagtatcttgcataccataaccctccctcgatccagatttctacagtgagtacaccaagtctgtggttctcattagtgactggtttaggaaaaaataaagaaaaaaaaaactttcaaggctccaaggctctggagccagttgggcgtgggtccaaatgggcttgtctgtcagcagctgggtgaccctcaacaagctcccgcactcctttcagccttcattgccttccattctgaagtgcagtaggatggtctggcagagagctgccagtgagcccacgagcagtgcatgtgcttgggacagcacttggcaaacaggcagtgtacaggttatagaagattattatatcacaaatagagatggcatatattagatatgcatgtattgcataatatgtgttaacatataagttttatgaaaatatatgtagttacataatagtatatcgttaatatattaaatattaactatatattacatacatatattgcataatacatatatcataatgtaaatatataatgaaatatatgttacaattatacatgtatatatgtataattacaatcaattacattataaattataacaactaattgttataatatataaataactgtaatattagtcataattatataattacaattataattggttaaaattacaacctatatgtatatgatgttacaatgtgtagaattataacagttataattatactaattattagggctataatagagttgtaataatatattagggttgtaatactaattataattagttataatggtgttacaattctacacattgtatcatgatcatacacgtataattacacacgtatgattaactcacattatgtgtgtgaatcacctatcgataatcccattcttggagactcagtgccgaatgagcagtgaactggcaaaggagcagagggccagagtctgtggttctccgggataatcaacttggtgacacctaaaggtccttggccttttctgtgctttttatactcacctgacaattgtccagtctcaggaaaacccacctttccctctattccacacctgcaccagagcagcacgatgcagctagagaagaggagacctaaagaatctctttgtgcgtccaccactgtacggggtctctcattcccacaaggcaatcttctagattcccgcagtcctgcctacaacggctcacgtaacatctctgaatggcatctcaagctcctatacccccaacccaaactcttcttacccagaccctgctctgcccccaatcttccctgcattggagaatggtcccaccctttacctagctgccaacctcaccctctgggaggtgttcttggtaccctccctcctaaaccacctcgaatccattggcaaaccccattggctctaccttccgatctatcctgaaatcctataacctccccatgggccactccctcctggtcaataggagccctatctcttgctcatactggtatttttgtccggactgtagtccacctgtccacagcagcctgcatgatctttcaaagtacgtcagattaaggtaacatcccacttccaatccaaggatgactttccatctcactcaagacaaaacagattcctacacagcccagcatatcccaggcactgccatctcctaccactatcaccctcactctactccaaccatgctagcttcctcattgttcctccaacatgctgtgcttattccaaccttttgagatggagtctcactctgtcatccgggctggagtgtagtggcacgatctcagctcactgaaaccttcacctcctgggttctagcgattctcctgcctctgcctcctgagtggctgggattataggcaccatgcccgactaattttttgtgtatctttagtagagatggggttttgccatgttggtcaggctggtctcaaaattcctgacctcgtgatctgcccgcctcagcctcccaaagtgctgggattacaggtgtgagccaccttgcccagcccaacctcaggcctttcactctgctgttccttctccgcatacggctgcctcccccttgcttcatctgagtctctatttaagtatcacctgttcaaataggttagtgagagaagaccctgctgggaaatcaaccccatccctgtcattctactctcgttctactttgtttttcttcatatctattgttttgtttttatatgtcactcataaaactataccttccacatgggcaggaagtaaatctgtcatatctaccaccccagccttgaggccttgttctatctctgctagaagctcacatatgagttgaccaaaaaattcattacttcctggggtcctcgtggaaattaagtttcttggcaaaagctccagagacgggatcaacaaatccaggatgctactctgaatctgttttagagcaattcctggcacatagtaattactcaatgaatgttactttttaataatataaatagatatcaaatgaagaaaccattgttctagatatctgtgcccatagagtcatatctagaaatggaagtagggaaaacttactccagtctctctaaggcacacttggggtgagtcagggccgcacacaatagctttatgccatcatcttggagccgattaaatcccaggcacaatcgagttacgtgttggatgctggtgagaaacaaggctaggtcctgacagctggctgccgacaagttgcatttctccaggctgtggaaggtgcaggtgcaaggtgagcctcagccatgatgcccaggttcctctacctttctctctcaaccccttaacccccgagacccaaacattatgggaagattaaattggagaaagaacaaaagcttaaagaaggagaaaaagggccaggcgcagtggctgacgcctgtaatcccagcagtttgggaggccaaggcgggtggatcacctgaggtcaagagttcgagagcagcctggccaacatggagaaacctcatctccactaaagaaaatacatatatatatacatacatatatatacacgtatatatacacacacatatatatgtatatatatacatatatacacacatatatacatatatatatacacacatatatacatatatatctgggcatggtggtgtgcacctgtagtcccagctactcagaaaggctgaggcaggagaattgcttgaacccaagaggcagaggttgtggtgagccaagagtgcgccactgtactccagcctgggtgacagagggagactccatctcaaagagaaaaaggtgaggcaaggtagggttttctcagccctattgaggtgtgggctggattgcacttagttgcagaatgagaggactgccctgtgcattacaggatgtcaataataactgacctttacccactaggtgttacccactagtagcaacccctacaccatcaggacaaccaaatatgttgtccaggcattgccaaatgtcccctgggggacaaaaatcaaatcatccccagtttcaactaatttaatagaatccagttgaaaacccctggatttggggagaatcaaagaagcctaaggaaattatgcaaagaaaggctgccgtgtgagatagccatgatcaaagtgaggggaaaactggctggaactgagacctaaggtggtaggaagaaagaagaggccaggcgtggtggctcacgcctggaatcccagcaccttgggaggccaaggcgagtggatcacctgagttcaggagttcgagaccagcctgtccaacatggtgaaaccccatctgtactaaaattacaaaaattagctagggatggtggtgtgtgactgtaattccagctattctggaggctgaggcaggagaattgcttgaacccaggaggtggaggttacagtgagccgagatcgtgccaccatactccagcctgggtgacagagtgagactccatctcaaaaaaaaaaaaaaaaagacagatgatagacagacagacagaaagaaagacagaaagatagaaaataagtatgtcaatgtgataagtaaatgcagtagggggatccctaaggttccccaaaacctacccactgccacccccactgtgccactccagcttgcaaagaagatgctttgagaaggccgcaagacttacgacagctccttcaggggacacgttggtagcgtggaggactccctcaggcttctcacatcagagagatcattgtctcccaggctgaggaagttgagacttgtgttctcagtgagtttgagaaagagctgacaaatctggtaggtaaggccacaggactccaacctatcacagaggccccgagacagaccgttactctttgaaagagtgatctgtgtttacagacccccccctgctccatgaatgaaagctgactttctccctcttccccatccctttcagaggttggatggcccgcatgtcaacgctactcaaagcatggtccatgatccagcaagagcagcatgacgtggtagcctgttagaagtgctcattcttaggtcccaccccaaatgtgcaggatctctgcagttgagttcctgggatctgtattattatttttttttttgagttagagtcttgctctgttgcccaggctggagtgcagtgtcacaatcttggctcactgcaacctccgctcccgggttcaagcgagtctcctgcctcaacctcctgagtagctgagattacaggcatgtgccaccacacccggctaatttttgtattttttagtagagacggggtttcaccgtgttggtcaggctggtctcgaactcctgacctcatgatttgccccactccaccacccaaagtgccgggattacaggcatgagccaccacacctggcctggaatctgtattttaaaacacccactaggttgggccgggcacattgactcacgcctgtaatcccagcactcaagaggccgaggcaagcagattgcttgagtccaggagttcaagaccagcctgggaaacatggcaaaaccccatttctacaaaaagtacaaaaattcactgggtgtggtggcacacacctgtgggtaccagccactcgggggctgcagtgggaggactgcttgagccaaggaggcagtggttgcagcaagcagagatcacgtcattgcactccagcccggggaacagagtgagaccctgtctcaaaaacaaaacaaaataaaaaataacctcccccaaggtgaggctaatatacattaaaatttgagaaccacggctctacacataggaacattctcctttgctcatccttctctgtctccttttgctacaaggctgagtgctgtcagccctcccagtggatcgtggaagctactggtggtcttgcaaccccccttgacagatctagggagccaaagacttaccacagatacttgaggttgcaagctgagtgtctcaaagctttaagaatcagggggacagtcattcccagcttgttagagctgaagttcagatgggtcagcttgctgttaccctgaagggcaataatgaggtcctgcagaacccactcaggagttaccgatttgcacctgaggaagggaagggacatgaaagctggattgggggagaagactggtttccaggatcccgtctgcctcctcaccctgccttctactacactcactgccaaggttatacacggtacacaaggaattaaaaacaagggctgagccatggtactggaccttgaaaataaaaactaaaatatactccccccaaaaaaatcagtaaactcagttgcaggtacgaagtcagggatccctccttccctctccacctctcctagagacctgccatgaagaggtcctggggccacctattcttctaggaaatgacccccccatatacacatacaatccaacctagaaaagcccagcaataactctcttgcattttctgaacttctttctccttatcttgagaactaagtacgaccaaaagtttaatattaaaagaaaaatttaaaaagaagactgcccaatcccattactgggtatatgcccaaaggaacgtaaatcgttctattataaagacatatgcacacgtacgttcattgcagcactattcacaatagcaaagacaggaaatcaacctaaattctcatcaatgatggaccaaacaaagaaaatgtggcacctatacaccatggaatactatgcagccataaaaaaagaatgagatcatgtcctttacaagaacatggatggagctggaggccatcatccttaggaagctaatgcaggaacagaaaacaaaataccacatgtcctcacttataagtgggagctaaatgatgagaacacatggacacatagtgaggaacactggggcctgttggaaggtgaagagtgggaaaaggcagaggatcaggaaaaataactaatgggtactgggattaatatctgggtgatgaaataatctgtacaacaaaccccatgacacacatttacctagtgacatacacttgtacccctgaacttaaatgtattttaaaaaaataaatgaaggccacagccccctctgcctgcctctcatgagtttggtccagctcacccaatacactgaggtttgaggaaagttacgatcaaacctttcactcttaactggttgaatcaatgcacacatctaggctttagaccttgaaaagtaagacctaatggtgggggaaaagcaaggtagaattcattggcctagacaccagatcattcaaacaaatcccacctcagattcaaagctacgcattactctctcctctatagttcccccccggcttaattgttatacaaggtccacctccatttgctaattccttcctatcttcaagccagatctgagacactgtcattcattcctccttggatcatattagcaggggaccaatacgctttagtccacagctgtgctccagctccagagaggaccctccccctgctcacctttattttaagaggttctatttttaattcacatactttttcccttttctgcagctcatgtttctccctaattcatcccaggacaagcctaggaaaccctggtgttgcctccaagaggaaagacatacacatcaaatgcagcagtatgctgataaatattaccactggatctccaggaaaaaaaaaaaaagtcctaatttatagctttgccaatttctgtggtgtaaattctccaagccaatcatggccaatttcgatctgcccacttgctgtcactaaatggagttacaaagataggtacacacacacaagtggctctcaccaggttgtagcagctggctccaacatgtcactggacagaaatacatgtccagaattggtaatagaaggcctgatggctttgttgatatcatttgaatatactaagtacattctcctcatggtgccttctatctcgttttcttggcttggaatgctctttttccccaggtatccatgggcacagtccctcctccttccctacactgagtcaagtcggtctttacccaaataccttttcagtgaggcccttctgcctttcctacctaaaaaatgcaagccaccttcctcctcatacatcctttctgagcccccagttttctttgggagatgccaccctcttgggtcctattttgatgattttgtttgcttccctgacacaatgtaagatccctgatggcaggagttatctgtgggcttcactgctagaacctcagaactgagaacagaacctggcacacaggagatgtccaatactcactgaatgcaggagtacccatcaaacactacctacttttgcttaagacacgaagcagtctcagactacacgtgtctgtagctcttcttgagtgctttgagtccaccataccctcgaagttttctactccttcaaatccagctcaaaacaggactgaggccctagggaaaaattactttgtccacaggtgcctctaatgcgagatcattcttgatagatcggcattttaaaatttcagcctactttgcccaagtagcagtttcataaatacaagcacagtttattttatcctcctgagcacgtagcttgccttctggcaaatagtcaaccacactcatcaaaagagagaagttgggagattctcctagggtatcttcttgagctgctggcgtctcacacttacgtcagtttctggactttgcatcttggatttttcagtgcaagacagagacccttcacagaggaagcatgaagtttgctgttactcaggtctagctcatgcagattctcatttgtgaccaacgtagagcaaatgctgttccatgcgtgcatcctggaatcaaacttgcttgtccttcatgagggagagacagaacacggataagagcaaattagcctcaagcaatacccagaatacaacctacgggacacagaaagaaaccctaacaaaattattataattttcctaatgtggctgggtgcagtggctcacgcctgtaatcccaccactttgggagaccgtcgggagtttgagaccaccatggccaacatggtgaagccccgtctgtactaaaaatacaaaattagccaggtgtagtggtgcatgcctgtaatcccagctactcaggaggctgaggcaggagaatagcttcaacctgggaacctacatctgtcagggtgtgggggttgcaagaccacccctagcttccatgatccactgggagggctgacagctctcagcattgtagcagatggagacagagaaagatgagcaaaggaaaatgtccctatgttagagccatggttcccaaatattaatgtatatcagcctcaccttgggggaggttattttttattttgttttgtttttgagacagggtcttactctgttgcccaggctggagtgcagtgatgtgatctctgcttgctgcaacttctgcctccttggctcaagcaatcctcccaccgcagccccccagtagctgggaccacaggtgtgtgccaccacacccagctaataaccactcagtcatggacattcagttagatacaagtagatgtcttagcacaatgcctggtacttaaaccctccatattcaatgcctaagatataaagatgtctttaagttgatcaattagattagctaggaaactaggtgatgcctaaaggacaacattctttcaagttagagctgctccagaccatttggtcggaaataagcacgaatacataacgacaacacatccctggttttgcatgaaagaatttgcacagagcctgagaaaacaggagaaagctgagaaagaaatggtttgtaatactcactccagaatttccaagtccctttcaaggatgtgactgctaacagaaagccttagcttatttaaccttttacagtgctttaggcaaaatgaagaagcttggagttcttcgtcctccaaaatattaaggtcaacttcaaagatacgacccaacatcttctttgtgaagtcttcctcctgggactcgtgtaggcagtgaaaaagtcgtagaatgtgaaattggagagaggcactttcagccttacctaactcttctccccactttaataattcctccattaccctgggagatattttacaatgcaaagtatcttccagttctcttgctatgtttttatttaaaagaccaaagaagaacagaaccactggagtccagtaggcttctttgtcaagcaagacgtgttgcagtaacatcttcatctcttgtggctttgtggaatggggagggaattctctaggttcctctagcacaaaggacatggctgcaaaaaactcctggaaacttaggtgggtgaaagtagtgcaacccccacagtcattgatcttttgaagaatattgaactcgtagagagaatcaatgaaaggcacttccaggccctcgatctcagtgtcttctttgttaaacgtgaagttcatagaccacagcccttctatggccagactgcagagggccctccattgtcctggccagctgtcatctgccaaatctacctctgctgtggagaacaagttggagaaaaaataggcatacagactggtggtagtctgagtgattgactggagatcgtaatacctcaccttcggctgcttcagacaggaacatacggtccaacacaccatgggggcactgcaggaatgaaagagagtttcgttttttcttagctgctgcaggattttctcaacttcacttgagtcatcaaagtgtctcatgaaatatacccgtaggtcgtcccctgtgaaccctgtaatttgtacaaagcatggattcactaatgaggccttaagatctctcacaaaccaggtcttgatcgtgatcagtaaggtagccaggggaaccaattctttcttcaacaagctgtgtaggattttggtcactgggagctcctggtaccagtctgtacatggcgagccatcatccaagctctcagagcgtgactcagatatgattatttcctcaaagccatcaataataaacaggagcttctctggttgagacatgaactcttcaatgggggcatcaaaatcgggccaatccaaagaaatcaattcagcaaaggtagtttccttcatgtaccttattttatggcagctgagatagaaaacataggagaacctttgctgaaagagaactccatttgcccagtgcagcatagcctgcattgccaaggtggtcttcccaacccctgccctccccaccaagactatcgtctgggcctgggctctagtcctattaggatccagtaggcgctgcagttcctcatgttcgtcctttgatgtattacggatatatacgtggtctttaggccaactgatgttgtcccatgtctccagtagttcagccttcatgttctctctgtattttcttctgtggtctagagagggcggagtggggagaagaatggtaagaataaatttcagagttaggaatgattcagttacaaagttcctaccccaaagacttgaataagagaaactctgccttccaggattttgtgggaatgcagtggtagaaagttgcaaaaggaggctgaggtaggagaatggcgtgaacccgggaggcggaggttgcagtgagccgagaggcaccactgcactccagcctgggtgacagagtgagactccgtctcaaaaaaaaaaaaaaaaaaaaaaagttgcaaaatatgaagacagttaaataatttgatgatatatacaaatgaaaaatacagaataacataagagcgatcaagaacacctttaagagagggcagagaagggatcatagcgagaagcctctcactagaggattctacactgagaatggagaagaatcatcagaagagaagtcagtctggggtactttcaggcggggggaaggccaaggtgaatgcccacccagaatttttttctgcaagcctcgtgagtgtgcccactccattgcctgaccagctcagcaccccaaagacaccttctagccagtagagggggcccatgagccctcttccctcaccagctatcaggttttcctcacttcctcgaaacacttcagagcaacaagggatttgggcaggtcagagtcccccactcacagaaggctgacccgactcgactcacaagggaatcagtaactgtagagcctgccagttttcctggtccctgtgcccagacagcttcagctggtgagggcttagactctaggttgccctgaagatcaaggctttgtctctcccattctccccattcctgggtttcttcccaaaatgactactgtggggccagtcacagcacaagggccaggacctctacagaggctggggtgaggagtgattgagctagcgattcttagaggccttctggggcctactacgtatgctgagacagaaatgagcattctagagtatagtgaccaaggcacatggtaggaggctggatcgtgattatctttgctttgaaaaccaaggaatgagatgccgtaatttatatttttagaactccaggttttataaagaatagattatgatgcatcagtgtaggaaaggaggtagagaaaacaagtagaaagctactactatcttcatctaagtgaaaatgggcacctggcagactagaatgtatttgtagaatataccccatcagtatatgtaactattacatatctgcaaaaaatttaggaatgaatggtaatcaccattctactttctacttctatgagttcaagattcttagatcccatatattagtgagatggggcagtaattgcctttttgtgcctgacttatctcacttaccataatatcacaaatgatagaatttgtgttgtcacaaatgatagaatttcacaaatgatagaatttccttctctttaaaggctgaatagtattctattgcatctataggccatattttctttatccattcatctgttgatggatacctaggttgatttcatatcttggctattgtgaatagtgctgcaatgaacatgggagtgaaaatctctttgacatactgatttcttcttgccaagtgaaataagccagacacagaaagacaaatgccagatgatttcacttatatgtagaatctaaaaaagtaaaactcagaagaagagaataaagtggtgattactagaagctggggaatggcacggggaaaagagagggaaaggagaaattttgagcaaagggtacaaagtttcaggtagacaagaggaacgagttctgtgatgtactgcatagcaatgtaactgtagttaataacagtgtgttatatagttcaacacttcagaaaaagtagattttaagtgttcttaccacaaagaaaaagtaagtgttgtggattaaggaggttcgagatggctgactggagacattgggtgccagttcttagaaccaaaattacaaataggtaattacagccatgtgcggtggctcatgcctgtaatcccagcactttgggaggccgaagcaggtggatcacctgaggtcaggagttcgagaccagcctgaccaacatggtaaaaccccatctctactaaaaatacaaagattagccaggcatggtggcacgcgcctgtaatcccagctactcgggaggctgaggcaggagaatcacttgaacccgggaggcagaggttgcagcaggccaagatcgcaccactgtactccagcctgggcaacggggcaagactctgtctcaaaaacaaacaaaacaaatagataatcacaattcaaacagagtatcaggagagaatattcgagcccaacagagaactcataggaagaagctggggcacagaaaaaggaagagaagccaactcagccagcagagatcagctaggataggcttgccttgtccagccccacccaacttcactcccacccctccatggctgatcatggagcccaagctcctatgcatttcacagaccagcccattgcctgatgcacaagaaagtttctcctggtaaacaacaatcaagcataaaagctactgcaactgctgcagctggctctaacctgcacgtgtcatctactggactagatgtcaaactacacaacccaatacaaaagctgctaacacaagtaaacagtgcttgggaaccagataagctttaagacctcactaacctggccccacaggagaccaagagcctactcacacacctagtaaaccactactaaaaccacatttagaaagccactgcactaatactgtctataaccaaggaatttatagagtctttgtcaatgaaagcactcagaaaagccaaatgaccctactaaacacacattatagtcacatcctcaagggaaaaaatagtcccatctaaacagcagtaaatgcaaaaataagaagtgatagtttcttcagataagaaactaatgcacaattcttggcatattaaaaaaactcaggtgttatgatacccccaaaggattgtactaactctctagcaatggatcctaaccaaaatgaaaatgtaaaaatgccagataaataatttaaaatattgattttaaagaagctcagtgagatccaagagaaatcataaaacctgtacaaagaaatcagaaaataaattcaggatatgaatgagaaatttatcaaagagatatttttgagagaaaaatcaaataaaacttctgcaagtgaaaaattcattgaagttacaaaatatagctgaaagtttcaacaacagattagacaaagaagaggaaagaatctcagaacttgaaggtcttttgaattaatttagtctgacaaaaataaacaggattttaagaaaatgaacaaagacttcaaaaggcgtgggactacatacaatgttggaacctatgaatcataggcattcctgagggagaagaaagagcaaaaagttttaaaaacctgttgtggaaataattgagaaaaacttccctactctggcaagagatccaggcatccaaatataagaggattaatgaactccaaaaaaaatgcattgcaagaagggcctcactatgatatttattcatcagactaagtttaatgtgaaggaaaaaacgtcctaaaaaaaatcagtaagagaaaataatctagtcacctatgaagcaaaacccatcagactaacagcagacttctcagcagaaatcttacaagctagaaggaattggaatttcaaaggttttttgtttaaagaaataaactgttaaccccaagttttgtatccttctacaataagctttataaatgaagaaataaagtctttttcagacaagcaaacactgagggaatttgtcactactagacttgtactacaggaaatacttgaaggagttctaaacatggaactaaaaaggttgatacttgccatcacaaaaacacacaaaactataaaatacaccagtcttataaagcaattacacaaaggagaaagaaatcaaatgatagcatgacacaattccatcaaatcacaaagaaaaagaacaaaaaaatctgcaaagcaaatggaaatcaacattgtaactggaaaaaaggtcatatatcaatattaaccttcaatatacatggattaaatgcgcttcttaaaagatataaattggaggaatagattttaaaacataagccaaatatatgctgcttaaaaaaaaactcatcttacttcactatagactgaaggtaaaggtgtagaaaaagattccacttttccccctttgcttcacaaaaagcaaactggagtagctatacttatattagttgaaagactttcaaccagcaacagtttaaaaaaaggcaaagaagatttttatataatgataaagggatcaattcaagaagatataataatcctaaacatatatacatccataccagagtacctagattcataaaacaaatattattagacctaaagacagcaaaataataatagtgggagacttcaacaccccactgacagcactagacagatcatcaagacagaaaatcaacaaaggaagtctgaacttaaattggactttagaccaaatgaaactgacacacatttacagaaccttctactcaactgcagaatatatattcttctcatcagtgcatggaacattccttgaaatagaccgtatgttaggctacaaaacaaggctcaataaattttttaaaaatggaaattatatcaagtatttttctcagactacagtgaaataaaactagaaatcaatctcaagagaaactcctgaaactatgcaaatgcacagaaattaaacaactgctcctaaacaatctttaggtcaatgacaaaattaagacagaaattaagttttttgaaactaatgaaaatggagacacaacatatcaaaacctctgtgatacagcaaaaaaaaaaaaaaagtttatagcattaaatgcttacatttaaaaaaaaatcacaaattaacaacctaacaatgcaactcaaggaaaaagaataagaacaaatcaaacccaaagctagaagaaaaataacaaatcagagcagaaatagagaccaaaataacaatacaaagaatcagtaaaaccaaagcttggttactttaaaaaataaacaagattgatagatggctagctatactaactaatgaaagaagagaagattcaaacaaacaatcagaaatgaaaaaggaaacattacaactgagccaacagaaatacagatgatcagagactactatggacaactctatactcacaaactaaaaacccaagaagaaatagataaatttctgggaacatacaacctaccaagattgaatcaggaataaatataaatcctgaacagatcaacaacaaggagtgagtgaatcagtaatttaaaaaattaataacaaaaaaatcccagtaccagatgtatttcacaaccaaattctacaagacatacaaagaagaactggtaccaatcctactgaaactgttgcagaaaaagatgttggagaggagggagtgctctctaattccttttattaagccagtatcatcctgatgccaaagctcaacaaggacacaaaaagacaactgcagaccactatccctgatgaacataagtgcaaaaatcttcaacaaaataccagaaaactgatccaacaacacataaaaaagataatacaccatgaccaagtgggttttaacccaggaatacaaggacggttcaacactcacaaatcaataaatgtgattcgccacataaacagaattaaaaacaaaaactatatgatcatctctacagatgcatagaagcatttggtaaaattcagcatcccttcatgataaaaaccctcaacaaactaagcttcaaaggaacatatgtcaaactaataaaagccatatatgacaaatccacagcccacattatactgaatgggaaacagttgaaagcattctccccaagaactggaacaagacaaggatgcccactttcaccactcctattcaacacaaaactggctagtcatagccagagcaatcaggcaagagaaagaaataaaaaggtatctaaattgtaaagaagaagccaaattatctgttgatatgatcttatatctagaaaactctaaagacttctctaaaagactcctagatttgataaatgaattcataaaatcttagtattaaaataaagcaatgtacaaatatcagtagcctttctatactccataatgatcaagctgagaaccaaattaagaaggcaatctatttacaatagcttaaaaaaaaacacctaaggaatatattcaaccaaagaggtgaaagatctccacaaggaaaactacaaaaagcttaagaaattatggatgacacaagtaatgctcgtggataagaataaatgtcattaagatgaccatattttccaatatatcaattcaatgcaattcctatcaaactcccagtgacatatttcacagaattagagaaaacaatcctaaaattcatatggaaccaagaaagagccctaatagccaaaacaatcagaagcaaaaaggacaaatctgtatgcatcaccttacctgacttcaaattatactaccaggatatagtaaacaaaacagcatggtactagtacaaaaataaacatagatcaatgtaacagaatagagaggccagaaataaagctatatacctacagctagctgatcttccgcaaagtcaataaaaacacgcactagggaaagggcactctattcaataaacggtgctgggaaaactggctagccatatgtagaagaataaaactggaccatatctctcactatattcaaaagctcactcaagatggaatagagatttaaatgtaagacctgaaactgtaaaaatcctagaagaaaatgtagggaaaagttttctggacattgccttggcaaagaattcatgactaagacctcaaaaacaaatgcaagaaaaacaaaaataaactgatatgccttaattaagaagtttctacacagcaaaagaagtaatcaagtgaacagataacctgcaggataggaaaaaatatttgcaaagtatacattcaaagggctaatatccagaacctacaaggaactcaatttaaataaaatcccattagaaaatggagaaaggacataagcagacattttttaaaagaagacatagaagtagtcaagaaacatgtaaaaaaaaaatgctcattatcactaggcagagaaatgcaaattaaagccacagtcaaaaaacccaaatgttggcaaggattcagaaaatggaacacttgtacactgttggtgtgaaagtaaattagtacaatatctatgaaaatattaggatatttctcaaagaactaaaaatagaactaccatttgatcaaacagtatcactattgggtatctattctaagaaaaaaaaatcatatcataaagatacctgcactcctgtgtttattgcagcagtattcacagtagcaaagatacgcaatcaacctaaatgtccattaatggatgactggataaagaaaatgtggtgtatgtatgtatgtatgtatacacatatatacacacccaggaatactactcataaaagataatatatcttacagcaatatggatagaactggaggccattatcttaagtgaagtaagtctgacacagaataacaaataccgcaagttcttacttataagttggaactaaatcatgtgtacatatgtacatatagaatggaataatagacgttgaagactcagaagggtggaaaggtaggagggggttgagggacgagaaattcctttaataggtacaatgtagactattcaggtgatggctccaccaaaagctcagactttaccactacacgatatatccatgtaacaaaatggaatgcaaaccacatattgagtcaagacagtatttctgttaatttggcaaatatttggaagaatttttattgatacttggaaggaaaaagacacccacaatatcataacggatgatattttgttacagccttttagaggatcaatttgactataagctttagattatatatatatgtttttgtctaggagtcctactttaagaatgtcttctacagaaatatttgtggatatgcacatatgatatggacatttatcaaagtattgcttaatgttttttaaaaagctggaagcctagatttctgtcaacaggaaaaggttaaatacaaaccatgacacatccatacaaaggtatatggcaaaagaataataaatattacctgttatgatcccagaaaaagagattaagttaaggatctggagaagaggaacttatcctggattatctggggggctaatacaattgcacatatcatcctaaagtaggagcagagggagatgaggcacagacactcagaggaaaagacatagcaggtggcaatgaggccacagagttggagatgagagtcatgaggccacaacccaagaaatactggaagccaccagagctggaagagaccagaacagatcttccccagagcctttctactgacatgttgatttcagttaattggtatattagtctgttctcacactgctagtaaagacatacccaagagtaggtaatttataaagaaaaataagtttgatggactcacagttccacatggctggggaggcctcgcaatcatggcagaaggcaaagcaggagcaaagacacaacttacctagtgggaggtgagggggcatgtgcaggggaactcccctttataaaaccatcagatctcaggagacttactcactgtcatgagaacagcgagggaaagatccaccccatgaatcagttacctcccaccaggtccctcccatgacacatgggaattatgggagctacaattcaagatgagatttcggtggagacacagccaaaccgtatcatttggcctgtctctcaaagaggttttttttttattgttgttttttgtttttttgtttgtttgttttttcagatggagtcttgctctgtcactaggcttgagtgcagtggcatgatcttggctcactgcaacctctgcctcccaggttcaagcaattctcctgcctcagcctcccaagtagctggagctacaggcacacaccaccatgcccggctaatttttgtatttttagtatagatggggtttcaccatgttggccaggatggtcttgatctcttgacctcgtgatctgcctacctcaacctccccaagtgctgggattaccggcgtgagccatcatgcccagcagagttgttttaagctatccagtttgtcatacaattggttaacagaggccctaggaaactactgtagcatacaaccttcattccaagactcagcatcaatttatatgcccaggatactgaacactgatgctgctacacccaggagaaatgataatgttatgggaggatagaagggaagacagatacctaacaccatgacaagaagtcagtagataaccgattggaaaactaagaaatagcaggaaatattaatcacttatgaccatagaaacaaatatcagaagtagccccaaagagtagtgggtggatgtctctgtagagcagacctcaagagctggctgggaggattgatgctttgcattacaagctctatgtccctgtgattctttggggcttgtatacatgcacatgtacttctttgataaaactaaacttagaactagaatgtatgttttactttctcagagtgacaatctccatagggccactggtacaaaaactacagatgcctattaattcacctgttaaaaggtaatctcaatatcagttatttaacaaaagcaccaagtccagaagcagacaccagtgtgtgagaacctacaggaaaaacagagaatcccgtttatagtaacctatttttctgtaggagatcagtcagggtggtgggagaagttgtaggaaaaatgcaaactttcttggaaggctgggggagagggggttgcaaagctttggggaagaatgagctgaaggcatggttcttaccctggggcaaaggccaagtagtaggtacagaagaatgcagggaagtttatctgaatagcttgtttatcatgcctccagaaacctggcctttcatcacccacgcgcaggagtagggggtggaaggggcaccaccatgtgaattgcccacaagtgtgttgactcaaggcctttgtcattaaatctgttctaaataaatgcccgcagtgccagcttgtcagggcagcagctgctgactctttatagcaccctcctcagtatctgtgggcagcccagtcccctagcctgctctttcactggatatctgtgtctgagtgcattttttcattcgttgttcggccagggtctgcgggttggacctggcatttttcaacaaattgtactggaagaaccagttgggaagagcttttaatttattgcataccataaactgaagaaaatgtcagtatgaggcaactctactatggacctagtgaaaccaatgctcgtcaagcaacctgtccattatcaacataaagtagtatacacacctgcttcctctagcatctctggttcttcttggtttggatcttggcatccctgggcctgtacattccctgaaataaacagtgatgatgagatatgaaaataccccagactgaaaatgggccacaatgataaagactctcagtagaaccaactctttctatggcaaacttgagagtgaagagactggagaaatcagcatgcccagtttatattttttatttatttttaagaaatggagtctcactctgttgcccacgctagagtgcagtggtaccatcttggctcactgcaacatctgcctcctgggttcaagagattctcctgcctcagcctcctgagtagctgggattacaggcacacaccaccaggcctggctgatttttgtatttttagtagagatggagtttcatcatgttggcaaggctggtctcaaactcttgacttcaagtgatctgcccaccttggcctcccaaagtgctggaattgcagatatgagccgttctactcagccgtaagttattatttaataagaaatactggaagaactagatggaaagagtttttaattttttatgtaccataaattcaagaaatttcagcataggcagcaaatgtggaccaatgaaacgagtgttccatcaagcaacctgtcaattatcaaccaagtaatgtacacacctgtttcttcttctagctcgtctagttcttcttggtttggatcttggcatccctgggtctgcatattccctgaaataaacattgacgatgagatatgaaaataccccagagtgaaaatgggccagcaataatggaagcccccagtagaaccaactttttctatggcaaacgggattgaagagactggaggaatcagtatgcccagtttacagtaagttatcatttaataagcaatactgaaagaattagttggaaagtttttaattttttatgcactataaattcaagaaatttcagagtaggcagcggatgtggaccagtgaatgagtgctccatcaagcaacctgtccattatcaacttaaagtagtgtacacacctgctgctgcttctagcatctctagatcttcctgggttggatcttgcagctcttgggtctgcacattctctgaaacaaacagtgatgatgacatatgagaatacccagactgaaaatggaccagcaataatggagtctctcagtagaaccaactccttctatgacaaactggagtttgaaggtctgattcctccagttttctcaagctccattagcccaactgaagatgcagtgtgcactctggaaagtccacagcacacgctaagcacattcctgcctcagggccttggctccagccctccccgctgcctggattcccagacatctgcttagctcactctcaaggctctgctgaaatcttacctccacaatggtgcctgataatcctaatcatgactaccacctatatctttaataacataccttagcctctccccatctgccttatcctccgtttgcacttgtcaccttttaacacaccatgtgatttatgcgttatgtctattgcctgtctagggagatggctagtctgtttacggattcatcccaagtgtgtagaacagtaccccacacagagaagccactctaatatctttggagtagaatactgtaggaataaaagcaccaagaattgggttcaaaccaagtccctcaatttgctgcacatcaccactctgaatgtccccttcctcatgagctagaagacctcttctataactcacagtggccaaactcactttactgtgtagtacatagctgctacaggacaataccttgtaagggatttgcatctagagatatggctctaatatttacaactccattgcttgtcactgtttacatggcttgttctggttagcaagctgtgtcctgcacttcctccagatgttccatgttccttcaaagaacaagaatccatcattctacacccatgttagcctaggccaaataatcccagctctctgaagctccacagaccctacctgtggagtctgagccctacgtccacatatttcaagctgaagtctgtcctgaattctaactctcctggaagcagggagcccgagtgggaaccttttcctagccatagcccaagcagaggaaaagtagacgattttcccctcttcactggctctgtttatccaaaagccaactgtttgacatgtggcattcctctgttgcaaacgaatccaacgatgtgagccttccaggttatagctttactgtcaagtatcaggcatcaccatctggatcttcatagattaaatttaagactccaatttagctgggaccacctgtcagaaaagccaggctattccagatgaacagcctagcaggactagtacatggctgcaaagagaaaacaaaggttaaaaattagtaagttttcacttattctccctcatgcttagggaactttgcaaggacatgaaggaatagcgaagagcgggcatatggaagttccactggtcactcaccaggcctaggcattcctccattctctggtgaggcgcacttatctgagtatgttttaaatgccagaggagcatgttttaggtaaccagcctacccttcctacacccaacattactccccccaggctccataggtttacttagtggtgtctttatcctaatcctagcaacccctcaatgtagggaagcaccggtgatttacacataattatgcacttaagtcaatgtggtccctgttcccattgcatgttaaacctcactgcccatgcggagggtggtgggggaaatcttggccttgtcttaaaggtccccccaaaaaaatgctttactgggaaatgattcctacataatttaaaatgcaatgcatgaagaatatagagtaattttaaacttttatgtatataatgaaataactttgaaaagtatgaattccacccaagcatagccaaatgatttttgacaaagatgcagaagcaattcaatagataaagagctcttttcaacaaatggtgctggagccaatggatatctataggtggaaaaaataagaagaaaaggggtagcaacctaaactttacaccttatacaggagaaaaaaaaaaccaacccaaaagagagaatagatttaagtataaaaggtaaaaaccagcccagcacattggctcacacctgtactcctagcactttgggaggctgaggcaggcagatcaccaggtcaggagtttgggaccagcctggccagcgtggggaaaccccatctctaataacaacacaaaaattagctgggtgtggtggtgggcgcctgtactcccagctatttgggaggctgaggcaggagaatcgcttgaacccggaggcagaggttgcagtgagccgagatcatgccactgcactccagcctgggtggcagagcgaggctccatctaggaaaaaaaaaaaaaaaaagagtgaaaactatatgacacatttgccttcgattattctcctttgcctgtgaaataaagtctaattccttaaaaaaaaaaaaaaatcccagttctggacttccatttgtacacctgtggaagcctgaaatagattcttccactgcaaattcacagacatatccttgggtggggtagagggtgtgtgtgtagtgaggtgacactctcccagctctgatactgctggccaggcaccatgcttaaacaatcatccataaaccaccagggcaagtgacgctttcagataaaaaaaactaccccaaagatcaactaacatgcaagttcctactctgtgcccagtgccttctaagcatttcactctagaaatgtagaggttggaacagtgaccccagtttaagaaagaattgtggccccgtggtaaaaatcacttgtccaaggttaccgttggtcaaatggaactagcctttgaatccagacatcctgactccagaacctgagcccttaagccaatagtccccaaaagacagtacgtgggtccctgtatacacagttgtgtccgcaaactcactctcagatgcatatcccacaacactggtcaagtacagaaatactcatggtacagtttcctagatgatggggctaacagggcactaagaaccacctgatccaactgctgagcttttatcgtcccctgcatggctggtgaggtggatgtggcccagggctttctcctacttgagaggtatcttccccatgacccacgcctttagaaggccaagtaggaacaagacaaggaccagggaaacggggctcctgtgatgtgccccgcctggccctgcagccttcaggcaggaagtttatgccgccattcgaaatcagcaacaagaaacaaaggataaatgcttgacgggagggacaccccatctaccctgatgtggttatgacgcatcacttgcctgtatccaaatatctcatgtaccccataaatatatacacctactaagtatccagaattttttaaatttaagtttaaattttaaaaacatcagtgacaagaaacaggataaatgcttgaggtgatggacacactccatttacccctgtgactattacccaatgcatgccagtatcaaaatatctcatgtaccccataaatatagacacctactatgtatccaaaaacttttaagtttatatttttaaaaatcagcaacaagaaagtaagttcttcctttgagagcattctcctctgtgctaattcctctctccaggtctctataaagagagatattcagttggaaacagaatttaagagttctaaatctctattttcaatctctgatatcctttcttcatgactaaaacaccaaaagcatggcaacaaaagccaaaattgacaaatgggatctaattgaactaaagagcttctgcacagcagaagaaactgtcaccagagtgtacaggcaacctgcagaatgggagaaaatttttgtaatctactcatctgacaaagggctaatatccagaatctacaaacaacttaaatttacaagaaaaaaaaatctcatcaaaaagtgggcgaagtatatgaacagacacttctcaaaagaagacatttatgcagccaacaaacatgaaaaaaagctcatcgtcactggttattagagaaatgcaaatcaaaaccacaatgagataccatctcacgccagttaggatggcgatcattgaaaagtcaggaaacagatgctggagaggatgtggagaaataggaacacttttacactgttggtgggagtgtaaattagttcaaccattgtggaagacagtgtggcgattcctcaaggatctagaactagaaataccatttgacccagcaatcccattactgggtatatacccaaaggattataaatcattctactataaagactcttgcacacatatggttattgcagcactgttcacaatagcaaagacttggaaccaaccgaaatgcccatcaatgatagattggatgaagaaaatgtggcacatatacaccatggaatactatgcagccgtaaaaaaggatgagttcatgtccttcgcagggacatagatgaagctggaaaccatcattctcagcaaactaacacaggaacggaaaaccaaacaccgcatgttctcattcataagtgggagctggacaatgagaacacatggacacagggaggggaacatcacccactgggcctgtcagtgggtggggggctaggggagggatagtattagaagaaatacctaatgtacatgatgggttgatcggtgcagcaaaccacaatggcatgtgtctacctatgtaacaaacctgcacgttgtgcacatgtaccctaaaacttgaagtataataaaaaaatgaaagtagaaagaggaaaataataaagataaaatcagaaatcaatgcaatacaaagcatgcaatagagaaatcaataaagcctaaagttggttctttgaaaaaaaagaaaagaaaagaaattaagacagtaaaaaaaagaattctaaatctcattccctagttttctgctttacatctgcctattccaaacaagagtatctgagggctttaaaaatgagagagggacagggaaaaagggtggagtggtgttctagtctccatctcatcctcctttccaccagaagatacacaaagcccgaacttgtatgactccgcatgccccgtgtccagggttctgatatggaagactcagtattgcccactctccttccttagaactcactcatttgagggtaggagaagctgtacaaggtcaagcacagagcctttggagacacactgcctgggctcatgtcccagctctcctggtcaccagctctgtgactttgggaaatttacttaagctgtctgtgcctcagtttccttctctgtaagatacaagtaataggacctccttcttataaatatagtgaagagtcagtacaaatgtatagacagcattaagataaatgcctggtttatagccaggcatggtggctcacgcctgtaatcccagaattttgggaggctgaggcaggcaaatcacctgaggtcagaagtttgagaccagcctggccaacatggcaaaaccccgtctctactacaaatacaaaaattagccgggcatggtggcaggtgcctgtagtcccagctactcgggaggctgaggcaggagaatcccttgaacccaggaggcggagagtgcagtaagccaagatcacaccattgtactccagcttgggtgacaagaaggaaactccatctcaaaaaaaaaaaaaaaaaaaaagagtcaatgtctggtttataacaggcaccaggaaacatgattattttcaacagctctcataggcagtcagttcttttataaagtgatgtgtgcattctgaaaactcaccacagcagattacatggtgcactaagaccagacggcttacaggagatagaatcagtgattatatatatatatatatatatataaaattttaaccagaagcttaaacagcatggttttatacttgctgattaattacaaaacactttattaccacaataaacactgcacgatcctacaacaccacaatcagccctgtaacacctcagcaggtcttgcaatgccacagaagatgtggcatgaaactttaccctgagtaaaacatgaactttgcttgtgaatatgggaagtgtcgcagcttgtgagtttttgtgaagtgaaagaacaatgatctgaaatcagacagaaagtgtagaatgggcaaggctcgtactgaggaagcgggtagatgtttgaggtacatgcctgtgtgcattgtgtacaatcctacatggctctgctcggctgagtgcagggtcggtgggttgcgggggcagggcgggggttgttgtggtttcttagtgtttctcttgggcaaaaccatgcataagctaacatgaaatctgtgctgcactcaaattgttcccagtacgacaatcacactgggacaaatttgcatgtttaaaagaagcctgggctgggcgcggtggctcacgcctgtaatcccagtgctttgggaggtcg[134 bp omitted]gaggcaggagaatcgcttcaacctgggaggcagaggttacagtgacctcagatcgcaccactgcactccagcctgggcgacagagtggagactcaggctcaaaaaaaaaaaaaaaagaaagaaagaaagaaagaaaaaggcttataacataactgaatgtgcctcttccgattccctttcttgcctttgctactccttcccaggctagagcactaaatctttatagcctttatgcctttaaacatcatactgtcatagattatcaaggaggatttgtagggggagatcggcagtgtggaatgaccccacaaaaacccagcggctacctccttgcctcaggagtaccaagcagccctcccgccttccttcttgaggactctcacctttcatctcggctctaactttctcacacagtgaggtcagattcattgtctggaagatgccgaggaccactttccatgcctgaccttttgggaagtgttcatccaaaagaaaggacagattcaaagggtcggcagctctcaagtttgcccaggggatacgcgggaagtgcccctggggggccgaccagaagtccatcagctgctggggttccaagcaaagcttgaattcctccagctgatactgatccagggccatcaggtaaggcagaagcccttggttggtaccaccgttggggcaggtgattacagaaaagttcatcttgcccaacacatgcagtttctcacttcagcaaaggactcctatatccacaggacacttgtgacctgcagaaaaggagagagttgaaatcataagccataaatatcacctcctctcactgtcttgcctacacatttgagtattttcgcttcacagtacttcctgctacttgtgttagtacacttttttgttgttgttttgttttttgagatggagtctcgctctgtcccccaagctgaagtgcaatggtgcgatctcggctcactgcaagctccgcctcccgggttcacgccattctcctgcctcagcctcttgagtagctgggactacaggtgcccgccaccacgcccagctagttttttttgtatttttagtacagatggggtttcaccgtgttagccaggatggtctcgatctcctgaccttgtgatccgcccgcctcggcctcccaaagtgttgggattacaggcgtgagccaccgggcccggcctcaactgggtattttctctagcaaccttacctagactcgagatcactggctttcatcccatcccagaaggaacaatgccatcagcacctgatttatctgccttactaacagtgacagctgtcctagaaaagttacaggtgcatgatggtacttaccaactcacattcagagggttcacctgaaatgtgaataagaagaacattgaagttaattagtcacagtaaagatcaaagacatttgagagatgggaacgggggaaactaatcagggagaaggggtaacaaagagagaaaatagaagtttccgcccatcacgattttggccaccaggcagctaatggtgattgagacagatctgccactattcccccatagaacctggtccggcatgtatgctgggtcatgtcaaaataccaggtagtattgaaggcaacagatagacagcagaacaaaagacttttttttttgtgatggagtttcgctctcgttgcccaggctggagtgcaatggctggatctcggctcactggagtctttgcctcccaggttcaagtgattctcttgcctcagcgtccgagtagctgggactacaggtgcatactggccttggcctcccaaaatgctgggattacaggcatgagccaccatgcctggcccaaaacactatgcttgaagctactggtgtgtgacccccgaatgtctcccaaagagaaatctccagaagagatgtatgttaggacctaccctggcagcccaaattcattggactactccagaaattgttggagaaaagatggggaaagacacacagaggaaaacttgaaacatcatgaagaaaagccctttcaggtataagcagggaggataaagactaggggaaaagcttatttgagaatcaaatgacattaagctatcattgaacacccagtagaagctgagcaagggggctgggcgcggtggctcacacctgtaatcctagttttaggaggccaaggtgggcagatcacatgaggtcaggagcttgagaccagcctggccaacatggtgaaaccccgtctctaccaaaaatacaaaaattaggtgggcatggtggtgggtgcctgtaatcccagctactcaggaggctgaggcaggagaatagcttgaacctgggaggcagaggttacagtgagccgagatagcaccactgcactctagcctgagcgacaagagcaagactgtctcgaaacaataaaaaaaaaattactccatgctgcacttttgttgtatgtctcttgtttaaatttttaaaccgagaagaactgaggtatcacatcagccaccaacaaactcctccaagattatagggttaggttcccgtgagcctctcgtcacattttcatccactagtcaatacataaccttgttttatatgtgtctctgtttaaggaaacctaatttaatacatatcgttgattcattaacattgagcccaccgccagcaacactatagctcatgcctgaaagaagctcagctaacgcatgcattttcttcagaactcacatcccagccttcttgtgtgtcgagcaccagacagaacttccacactacacaaggggacgtttagacagcaaagtcaccgacgaaaagcccagaaatgcaaaaacagggcactaagtagacccaccagcactgccttatctgacctcagctcgaatttttcctggctctgtgcatgtctggatgactttgaaagctctgcaaatattgatttgggggttgccagcagatcttagcgtgtagatgaattcacacacatggaatccacaaataaagaggatgaactataattaggatgaagcatgttgggtatgagacccacatggtgccatgaagttatacagcaagtaggccaagtacataggactcgaaaggaaattcctccaaacttgatgcatgcatcggattgagccaaggagggtgggaagaggattagggggtagagcggtcagtgaaaacagcaagtgcaaaagccctggagggaaaaaaaatacaagaacagagaaattcagctagaaaatctcacacaactgcggaatccccttggttgaggagatggaaagctcctaatcgaagaaggaagtgtgtgcgatcaacttttgctcctaagaaaacaccagcaggatacagtggagtaaaaggtcccagagaaaggtgaaaccttagagcagagagaggagacgtctcttaccaaccagactttgaatctcacatgagtttccagaggctgattcgggaaaccccatagaagtagtcaccgccaccccctcctcacctgtgagcagccctcgggtccgtctgcctcctcttagctgtgtctcggggcctcctgtttatagctctcttcccgctccctttccccagcacaactcggggtcagttgagaagctgacaagactcagctgagacgtacgatatctggtttttctcctccagatctagataatcacaggattcttcaggctgggaggccaaactgggtttaaagaccatactatcctgaagtaaatggagccatccacgccagcaaagagccacagatgggagtaatgcctgtgattacccctcctaccatctgggcgacctcaggggacaatgaaagaggagagggagacagaggtcgtgagacactaaaatcacggttgccgccacttacaggactgtgtcttcttccaactgcaggagaaatgctccttccaccattccatcatgaatacaaaggattttccaccgaagtcaggaacaagatgaggatagtcataactccgctgctattcaacattctgctggagatgtcaaccaattctatcaacaatgttagctagttttaaactcgggttacaggctttaaactagcaattggaaagcaattagagagaggtataataattggaaagcaacaggtaaaactacatttgcaaacttgattatgtacccggacaatgcaaaagactgcatgggagaactatcaacaacaagagaaattggtattacagcaggtaataaaataagtattcaaaaatcaatagacttcaaatatggaaactcaaaacactggaaaagaatacccctatttactatagcaaaaaaaaaaaaaatggaaataaaatgcttacttaaaaacttcagaaatatccaaaacttatgtaagaaaaactataaaatacatttctgcaagatccaaaagtggacttaagccttaaagaaataaataccacgtttttgcatggaaagctcaacctcataaatatatcacttctctctaatacaaatacatcaaggttttacctggaggtgcggaagtggattataaaattcaactgaacaaatcgaatttgtaggaatggcctggaaaatcctgaaaaggaggaatgaggagggactaaacctagcagatattaaaatataccatgaggcctttatgattaaaatatagtattggcacatgtgcaaacagactgggcaaaggaacagactagaaaatccagaaatagggctgggcgcggtggcttacgccggtaatcccagcactttgggaggctg[133 bp omitted]gaggcaggagaatggtgtgaacctgggaggcggagcttgcagtgagtcgagatggcgccactgcactccagcctgggtgacagagggagactctgtctcaaaaaaaaattaaaaaaaaaagaaaaggaaaaaagaaaatccagaaataaaattattaacatatataaatttgataaatattgcatcactcataagtgagggaaattgacttttaataagcatggtgatgctagatctgtttcctatacaacagaataattttcaagcacgtcagagatttaaatgcataaataaaactttagaagcaccagaagaaaacaattgaattcctctcaaacctgatggtggggaaagctttcttagctaagatttaaaattcaaaagcaattagagaaaaaataaacaaattttattacaaatgttttttaagcattcataacaaaagatgtgtgaagcaaggtaaaaagacaaactataaaatggtaaatatatttgcaacttatatcagaaagagtttatatgcctaatatttatttatctatttatttttgagatggagtctcactctgtcacccaggctggagtgcagtggcgacatctccactcactgcaacctccgcctcccaggttcaagtgattctcctgcctcagcctcccaagtagctgagattacaggcatgtgcacccatgcccaactaatttttttttttttgtatttttaatagagacagggtttcaccatgttggtcaggctggtctcgaactcctgacctcaaatagtctgcctgcctcagcctcctaaagtgctgggattactggcgtgagccgccatgcccagcctatatgtctaatctataaagagctttgaaaaattaccaaaatgaaatggagaaattaacaattgtttgtaagcaaagaaatgccaatgactcttaaccatctgaaaacatgctgaatctcctatacaataagagaaatgcaagttcaaaattatacacattcttggctatttcctgtaaacctaatgaaactattttacctttgattttctctctgctgttgtctgaagacacatcatcataacctttgtgaatataaaactcatacatagcccgggcatgatggcacgtgcctataatcccagcactttgggaggctgaggcaggagatcccttgaggccagaagttcaagaccaggccaggctgtttaacctgtgatacccccgtctctacaaaaaattagccatgagtgctgtcatgcacctatggtccctgtcgtcagaggcatgtgaaccagagcaactccatcttgaaaatgagctgggtaaactgaggctgagacctactgggctgcattcccagatgtctaaggcattctaagtcacaggatgagataggaggacagcaaaaaatacaggtcataaagaccttgctgatacaatgggttgcagtaatgaagccgccaaatcccaccaaaatcaagatggccacgatagtgacctctggttgtcctcactgctacactcccaccagaaccatgacagtttacaaatgctgtggcaacgtcaggaagttaccctatatggtctaaaaatgggaggcatgaataatccacctgttgtttagcatatcatcaagaaataaccataaaaatggcaaccagcagcccgagggctgctctatggagtagtcattctttattcccttattttcctaataaacttgatttcactttacgaactcactctgaattctttcttgcaagagatccaagaaccctctctggggatctggaccgggacccctttcctgtaatgccgtttactccagaggctaaggcagaagattacttgagcccaggaagccgaggctgtggggtgagttatgattgcaccactgcacttcgtccggagtcatggaacgagaccctgtctcaaaaatatacaaataaaataaaattgaaaaaaattaaaactcctatgtaaaaaccgctgatattctatcctgagttgatgcaaacttggtaaagttggttatcttgtggggtttctccccttcaactataggtgattattactattattattattattattattattattattattattatttgagacggagtctcgctctgtcacccgggctggagtgcagtggcgcgatctcagctcactgcaagctccgcctcccgggttcacgccattctcctgcctcagccttccgagtagctgggactacaggtgcccgccaccac[131 bp omitted]caccgcgcccagccaactagtggtaatttttttaaaagaaaattcctcaagccagtccttcccaacgccccctcccttgtactctctgctggtgagttttccttctcccacaagctctgtctctgggtctccctgagactgggcccgttgtatgtgggacctagactgggccctgatgatcttgagaccctccttttgctcgatacaattatatcccaagtagaagagatgaacatgtaaacaagatgagcccgtgaatgactggatgtttccaaatgggaagtggcactttcggactgaacacggtgttagccttctaaggagactgggaagctctccaaacatgtaattttctgttgcttgttcttctagacctaagaagcaagggaagagtttcctttacaaatcggaagcacctgtaggatcaagacctgcagctcattcattctgaatcaagggagctaaatgccttccaatcggtgcaatgcagaggaattctagtgagccagcccccgccaatgggaagagaaggtgccaattgtctgaattccccggcacctataagggttggggggtggggcaggccaggcgatctccgttttgggagatgcttttgacaggaaggagcaggaagaataattctctgcagaggtgagctttgttttgttttgttttgttcttttctcttttctacctactcttttcctcatcatccacttccttgcagttacaatggctagacccttgagttgggcgcacccagtgggcccatactgaaaatcaaaagtgagagctagagattcaactgcaaacataaccagctctcattcataaaatccttgcccatctctgaaactcagctttcctgaccccgaagtggagtcctaaattcccaagttttctttcagctctgagggtctgagagccaggagactcatagcactagcaaaattctaagacctgaaagagatgtcgtggggtctccaggtgtccagaggtctagggtagccactgacagatgtagttagaaaaaaatcaaaatagctgtagacgcgaagaagaaatcgcgaggcacagagaaagaaagccgcaaggattaagcagcactgactttgacactgcccctctgcaaatattccttctcaataaacgcagatgtgtcacccacacggctcggctcgtgggcttaggaatttggtcaggttccacctgctggtttccaacactcacagcttgggctgaatttacttaacttagttcaatttccgttttctcctttgtaaattggacggaaagggattcatgggatataattcttaccaaaacgtagagttatatggactctagggtgatcaagacgtgaccacagaaccaaatggagatgacagacttttatcttttaaaaatgtttacccgctagaatagctatgtttaaaatggaaaataatcagcgttggcaagaatgtggagaaaatgaaactttagtgcattgttgatggggatgggaaatggaaaatagtatggcgattcctcctgctgacctcaggtgaaccgcccgcctcggcctcccaaagggctgggattacaggcatgagccaccgcacccggcctgctttttaatttttaatttttctgggtacatagtagaggtatatatttatggggtacacgagatgctttgatacgggtatgcaatgtgtaattaccacatgatggagaatggggtatccgtcccctcaaacatttatcctttgtgttacaatccaattatactattttagttatttttaatgtataattaaattgccatagactatagtcaccatgttgtgctatcaaatacaaggtcttattcagtccttctaattttttgggcacattaaccatcccccactttcctccccacaccccacaaccctccccagcctctgaacaccacccttctactctctatatccatgagttcaattgttgtgatatttatttatttagagacaggttctcgctctgtcacccaggctggagcgcagtggtgcgatttcggctcactgcaacctccacctcccgggttcaagcaattctcgtttctcagcctcccaagtagctgggattacaggcacccgccatcacagctggcttatttttgtattttttgtagagacagggtttcgccatgttgggcagtctggtctcgaactcctgaactcaagtgatctgcccacctcagcctcccaaagtgctggaattacaggcttgagctaccgtgcccaacctgttttaatttttagatcccaaaaatatgtgagaacatgcaatgtttgtctttctgtgcctggcttatttcatgtgtagatgatcctgatatacttctgtagggaaggaaatacttttccctctctctctctttattgatcttagattccatggctctctctttattgatcttagattccttggctggagtctgtgcattaggctcatgaaagacagattaacaaaagcacagcaaacagaagtttatgtgtgcatacccatgggagcactccatgatgagaacactcaggggtggttagaacttaggcttatatgtcatgctaacaaaagaacaatacattctcttttttttgagacggagtttcactctgtcgcccaggctcactgtaacccccgcctcccaggttcaagcaattctcccgtctcagcctcccgagtagcttggattacaggtgcccgccaccactcccagctaatttttgtacttttagtggagacagggttttg[141 bp omitted]aaagacctcgaattcctgggggggtaaattgtgagaaggtaaatgtatgggggagaaaatggaggatgagggctagttcataaggtttcttgtgtagatttttctggcgccctcgcactgctgtacgcatctggagcttgtctccggtgattaacttctgtgtttcctggtagagaaggggaaaaggggcacctttacaaactgatgtcttgcatttaggcaaatcaagggaagacagattttttcttgtgtctgctccttctcaagtatcttcagctcaaaatagtccgtttgaaatacacaacaaattattatgaactatagtcacactactgtgctatcaaatgctagagcttactccttctatccattgtatttttgtacctattaaccaaccgctcttcatccaacccctcccacctgcctttcccatcaatatgtacaattatcacgtaccaatttttaagaatgagtacaacaaactggaatatttgggggtggcgtattctgccgtccctcatttctctgaaaggccaggaactccttgctcagacccatcaaccacctgcatctggacgtgtgctctccaccctcttcctgccaagatcacttcagacccagcctgtgtcctcaattataccccttctcctgctgttatttcctcacttgccaacactacttttctcttctctactcccttgaatgtacagacatcccacagcatttccatctttaggaaaaaaaaatttttttttgagacggagtctctctctgtcacccaggctggagtgcagtggtgtgatctcggctcactgcaacctccacctcacaggttcaagcaattctctgcctcagcctcatgagtagctgggattatagacgcccatcaccatgtctggctaatttttgtatttttagcggagatggggtttca[141 bp omitted]atggaaagcggagcagggaggagggataaagagaggttggttcgtaggtattagaaagggaagagggaatgagatagaagatgccccactgctgcctttgaagaaggaggaaggagcaaaaatccaaggatggcatgtggcttctagaagctggagaaggccaggaaacagattctccccctagagtctccagaaggaaacagccctgccaacacctcaattttagtccagtgatcttagcccatttcaggcttctagcctccctaactgaatgttttatcttaaaaatactgtgctgtcggccaggtgcggtgactcccacctgaagtcccaacactttgggaggc[134 bp omitted]gaggcaggagaattgcttgaacctgggaggtggaggttgcaatgagccgagatcgtgccactgcactgcagcctgggtgacagggtgagactccatctcaaaaaaaaaaaaaaaaaaaaaactgtgtcgtcttaagccaccaaattcatggtaaattcgtcacactagtgcaacaactcacaattcttctttccaggattatgtctatagctccctacccttgttctcagtaggagagccagccagaagaatccttctaaaaattatagacgtcccacgccagtccaatcaggtcctgtgtgacctcttgagatcacctccactgtcttccccttgcccattcacctccactcaccctggtcctgctgtttctcaacagctccaggcacgtcctggccatagggtggtggtccttgcccttctgtctggaactcatctgatagccacacagcccattccgtgacctcttacctcctcctctcctccaagcttttgctcagacatccctgcttcagtgagccctttcgtcagccttttacaaatcgcagcaggctatttctcacttcctgttctctctcgcctctcctttttcccatggtgtgtatagtcttccatcgcatcagtgtgctcccatgggcatgcacacataaataaacttctgtttgctgtgattttgtgaatctgtctttcatgaccccaatgtacaagcctccagccaatgaatctaagatcaataaagggacagagaaaagcttttcctcccctacactttattttcattcactgaaatcttagccacatgaggacaacaattttttgtgtatcttttgctcaccaacgtatccccagtgccaaaaatagagagtttggcgtaatatttgacactgggatatttcagtgagtaaatccagaaggactgtgttatgaactgaatgtctgcgtccccccaaaatccacaggctgaaactctaaccaccaaggtaacggtagaagaaggcagggactttgggaggtgattaactcatggggccagagccctcatgattgggactccagcccttatgaaagagcctccagagagttcccacaccccttcctccatgtgaggaggacacagcaagaaggtgctctctatgaaccaggaagctgccctcaccagacactaaatctgccaaccccttgatcttggacttccagcccccagagcagtgagaaatcaatgtctgttgttactaagccacccagtgtatggtatttgttatggcagtccaaacagactaagacagactggcttgtgcacacaccatctcacatgtgcaagtgtatctgtaaggtgcagtttttttgttgt[131 bp omitted]cctca[133 bp omitted]agcctcccaaattgctgagattacatgcgtgagccaccacgcctggccttttttgtttttgttttttttgagatggagtctcgctctgttgcccaggctggagtgcagtggcgggatcttggctcactcactgcaaactccccctcttggtttcaagtgattctcctgcctcagcttcccaagtagctgggactacaggtgcatgccaccacgcccagccaatatttgttttttttttttttttttttaagtagagacgggttttcaccatgttggccaggatggtctcaatctcttgacctcgtgatcctcccacctcagcctcccaaagtgctgaaattacaggcatgagccaccacacctggcctcaggttgcagttttaggagtagaactactgaattccatggcagtgcacacgattggtagtattgtgaaaaggcctttcagataggttccccctgcttatgttcccttcagcagtgaatgaaagtaaagcaaaacgatgatgtaactgccaacatc[132 bp omitted]ttgcaacctctgcctcctgggttcaagcaattctcctgcctcagcctcccgagtagctgggattacaggcacccaccaccacgcccagctactttttgtgtttttaatagaggcagggtttcaccat[143 bp omitted]tggtcagcaatggtcatggaataagtagaggtagaaaatgtgtgactgtgttaggctcctccatgcagcgccacccactggacggaaggagcactagcaagagtcagccacccaggagcatatcacctttgtcctgggaccaagcccagctactctggacccaagggaggactgagtcaattaaacaagtttatccagatgtttgggtgtcacataagttataagagggagaagtgttaaagaagaagctattggccaggtgcagtggctcacacctgtaatcccagcactttgggaggctgaggtgggtggatcacttgaggtcaggagtttgagaccagcctggccaacatagtgaaaccccatctatactaaaaatacaaaaaaattagccaggcatggtggcaggtgcctgtaatcccagctactcagggggctgaggcaagggaattgcttgaaccagggaagtggaggttgcagtgagccgagatcacaccactgcactccagcctgggaaacagagtgagactctgtctctaagtaaataaataaataataaataaataaactattattggaagttggggcaggggggacaaaaatacacccatgatcctttttattttatttcttttttacatttcttttagatacaggggtacatgtgcaggtttgttatataggcaaacgtgttatgggggtgggtttgttgtacaggttatctcatcacccaggtattaatcccagtacccattagttatttttcctgatcttctccctcctcccaccctccagcctctagcagactccagtgtgtggtgttccctctatgtgtccatgtgttctcatcgtttagctaccacttataaatgagcacatgtggtatttggtttcctgttcctgtgttagtttgctaaggaataatggtctctggctccatctatgttcctgcaaaggtcatgatctcattcttttttatggctgcatagtattccatggtgtttatgtaccacatttttttatccggtctatcactgatgggcatttaggttgattccatgactttgctattgtgagtagtgctgcaatgaacatacacaggaatgtgtctttataatagaatgatttatattcctttggatatatatccagtaatgggattgctgagttgaatggtagttctctttttaggtctttgaggagttgccccactgtcatccagagtagttgaactaatttacactcccacacacagagtataagtgttcctttttctctgcgacttcaccagcatctgttattgcttgactttttaataatcaccattctgactggtgtgagatgacatctcgttgtggttttgatttgcatctctctaatacatgatccattttttaagaatacagcatctgttattgcttgactttttaataatcaccattctgactggtgtgagatgacatctcgttgtggttttgatttgcatctctctaatacatgatccatttttttaagaataaaaactttgttgaatttgagatcacttttaatctaatggagccttctaaccaaccatatattttctagattttagcttcactgaattattttacctgcttctaatttttcttttcgctaaaccttttgtgaaggctttgatattttgcttgcctcttccccaaaagaagtcatggagaatagaaactacaaacaatccattagtctaatggactaatcccaaacattccatgcatcttcagtttttccatagggcagagaatctttgaggaaaggaggtaaagggagtacccggcacgcagaatacctgccaagtaagcattacacgaatctgttttcttgggtagtgttttcatcttcttgttttattgttttatgtctctgcaggtctcgtgtttctctcttccaatcggttgtctttatcgtggacactgaggtgttctctgccttgactaaagatgagtgacgtgaatccaccctctgacacccccattcccttttcatcctcctccactcacagttctcatattccgccctggacattctcttgctaccccggctccccatgtgaaaatggggtcatgctgtacatgagaaacgtgagccatgaggagctacaacggttcaagcagctcttactgactgagctcagtactggcaccatgcccatcacctgggaccaggtcgagacagccagctgggcagaggtggttcatctcttgatagagcgtttccctggacgacgcgcttgggatgtgacttcgaacatctttgccattatgaactgtgataaaatgtgtgttgtagtccgcagagagataaatggtgagtgttgatctggtggataaagtgggggtgggcttggctgctgggcagctaaactactctagtcaccacccctatcacttattggccttctgagcaagaaagcaaacagtggaggaagataatggatctaacccaaaggcaaagactgtcatacgggcatttttttaattttatttttctgagatggggtttcgctcttcttgcccaggctgaagtgcaatggcacaatctcggctcactgcaaaccccgcctcccaggtacaggtgattctcctgcctcagcctcctgagtagctgggattacaggcacccaccaccatgcctgggtaatttttttttatttttagtagagacggggtttcaccatgttggccaggctggtctcgaactactgacctcaggtaatccgcctgccttggccccccaaagtgctgggattgcaggtgtgagccactgtgcccagcccatatgggcctattttttaaaaacttaactgaatactgcttatatgaggtgaacgttaaatgaagtcatagagaagtaggaagtaaaatagtggaaaagcatatgctatggaaacagcagaagacagctggtatagctatggtgatgtcaggagtgctatatttaaagcaagaaggttaaacactttaaaaggccatttcgcagcaacaaagggtgaatcccactggaggatattgtaatccaaaacctcatcttcaatatgaataaagcagagctggactacagtcatccccttatccaaggttttgctttctgaagtttgggttgatcatggccaaaaatagatgagtacagtacactgagatattctgagacagagagagaccacatttacataccgtttatgatagtatagtattataattgttctatttcattattattgttaatctcttactgtacctaatttataatttaaacttttatcatagatcggtatgtattttttttctattttgagatggagtcttcattctgtcacacaggctggagtgcagtggtgtgatctcagctcactgcaacctccacctcccaggttcaagcaattctcatgcctcagcctccccagtagctgggattacaggtgcgcaccaccacacccagctaatttttgtatttttagtagaaacggggtttcaccatgttggccaggctggtttcaaactcctgaccttaggtgatttgcctgcctcggcctcccaaagtgctggaattacaggtgtgagccaccacacccggcctagatatgtatttaaaaaaatcagtatccacattgttcagtactatccacagtttcagatatccaccggggatcttggaacatagaccctgcagagaaggggggactactgtattaaaggaaaatacaccaatccagaaacatgataggagctgtgaacccgcctctcccaatagctgatattacaagtagtcagtctcattggtaagaatggagaaaacgtcagctccacagttttaaacataaacacaggagagtgggtgccttacgtctccttagccactggcaccccaacagctggctcagcacctagcatgtcataggtgctcaaatattagatggctagagagtaattgattgtgaaaagggactttcttttgataaggcagcctaggaagtcctctttgaggaaatgatgctaaggttgagacctaacacaggaggaaatagctcatcatgtgaaaaggagagagagtcaccggaaaagaaaatcagaggggatggaaaccccgtgacccagtggtagagaaaatcttagtgttaaacagaaa[138 bp omitted]catggtgaaacccagtctctactaaaactacaaaaaaaaaaaaaatagccgggcgtggtgacgggtgcctgtaatcccagctattcgggaggctaaggcaagagaattgcttgaacccaggaggcagaggttgcagagggctaagatcatgccactgcactccagcctgggtgacaaaagcagaactccatctcaagaaacacacacacacacacacacacagagacacacgtacgcagttgatcctcattgttcatggattctgtattcgtgaatgtgcctactcattaaaatgtattcgtaacccccaaatcaatacttacagcgctttcaagatcattcccagacagcaacgcagcaaaaaaatcgagctgacctcctagccgaggtcaaacaaggtgacgctctgccttctggctttagctctcaccccgtaagccagtgtcatttccacgcctatgtggtgccacacttttgtgctttgagttggtggttttgctgtttaaaatagcacccaggctgggcacgatggctcacgcctataatc[131 bp omitted]cgcatctctactaaaaatacagaaattagccgggcgtggtggcgcacgcctgtagtcccagctacttgggaagctgaggcagaagaatcgcttgaacccaggaggcagaggttgcagtgagctgagatcacaccactgcactccagcctgggtgacagagtgagacttagtctcaaaaaaaataagaataaaaataaaaataaaaatggtacccaaaactagtgctgatgtgcctttccatgttcctcagggcaagaaggccatgctgtgccttagggagaaaatacgcttgttagctgagcttccttcaggcaggatttatcagtgtggttgaccacgagctcaatgttaaataatcaacaatatgtactaaataaggtgtctttaaacaaaaacacatgtaaaacaagtttttatattgatcagtccatgaaaatgttgtaaccagagactagcaggaaacaaacgttgtgttttcctgggggcaatggttcagtattagcgaatttggtgttcacaagaattttatagacgagaactaccacacataacaagaatcaatgactatatgtgtatgtgtatgtagagatatacacgtgtatgtacacatatgtgcacacatacatagatattaagctagaagttccttggtatccatgggggattggttccaggctctccctcaagggtactgaacaaattcatgggtgctcaactccttcatgtaaaatggcatagtatttgcatagaacccatacacatcctcccacagacttaaaatcactctaaattacttataatacccaacacaatgtaaatgctatgtaaatagttgttatcctgtattgggttttttatttttttgagacaaggtcttactctattacccaggttggagtggagtggtatgatcatggctcccttcagcctctgcctcctgagctcaagcaatcctcctgcctcagcctcctgagtggttaggactataggcatgccaccatgcctggctaattattttttatttttttagtagagttgaggtcttgctatg[136 bp omitted]ttttattgggtttttagtttatgttccatcctcagttggttgatcccaccgatgtagatcccacggtaatgaaaggccgactggacgtatagatacacccctacgtagatattaaactgtgtatggattttacatacacttgtgtgtgtaagagtatgtgtgtatttatatttctccctcagtgtctggctgggctatccatttataacatgtttttgaacaccttactcaatgcattgtagaacaacaccttttctcatttcctaaaattgctgtgatagagatagatctaggtgattttcttctccctgaacggaggtggtgagaggatgagactctgaagccatgtggctgcttctgtcctaaaaaggccattggctccatgctgtttccctgctaccaagatcttatcattcccgtggaacagcctccttttttctgttacagccattctgcctaccttggaaccagaggacttgaatgtgggagaaacacaggtgaatctggaggaaggagaatctggtatgtgcctgtatcacagcagaccctggtgaaaaaatgggctatggactgggatgagctgctcagttgctaaggcaagccagattttaagttaccatgtccagtgtttcttctacaatcagaaccaacatggcgaaactctgtctctactaaaaacacagaaactagccgggcgtggtggcagttgcctgtagtcccagctacttgggaggctgagtgagaagaattgcttgaacccgggaggcggagggttgcagtgaggtgagatcacgccactgcactcttgggtgacagattgagactccatctcaaaaaaaataataaaataaaaaaacagacacaaaccattggctcagcggtccccaacccccgggccatggactagtaccagtctgtggcctgttaggaactgggccacacagcaggaggtgagtggcagggagcaaccaaagcttcatctgtatttacagctgctccctattgctcacattacctcctgggctctgcctcctgtcagatcagcagtggcatcagattctcataggagtgcaaaccctctcgtgaactgtgcatgcgagggatctaggctgtgctctcctgagaatctaatgcctgatccgtcaccgtctcccatcacccctggatgggaccatcgagttgcgggaaaacaagctcagggctcccagtgactctacattatactgagttgtataattatttcattacatattataatgtaataataatagaaataaagtacacaataaacgtaatgcacttgaattatcccaaaaccatcccccgccacctggtccatggaaaacttgtcttccacttggggaccacttcaatagagtg[138 bp omitted]cctgccttagcctcctgcgtagctgggattacaggcacatgccaccacgcccagctaacttttgtatgtttagtagag[138 bp omitted]agagtctcactctgtcacccacactggagtgcagtggcgcaatcttggctcactggaacctctgccgcctggattcaagcaattctcctgcctccacctcctgagtagctgggattaccggcgtgtgcaccaccacgcctggctaattttgtatttttagtagagacagggtttcaccatgttagccaggctggtcttgaactcctgaccccaagtgatccaccatcctcagcctcccaaagtgctgggattacaggtacaagccgccacacccggccctcccaagtatttctgatttgaatggagataacacggctaacactacagcagcgatcttctatctgtgaggcaagaaatacaaagaaagggctgagagaatcgtgatgctgctggacctgaaactatggcgccactgaacctaatttcaacagctttacgcccgccatacttctcacgtagaaagcagtccttgttttgtttaagccacttcaagctgagttttctgttcgttggtgcttcctagttgacacagcagtatcaggaaaggttatttcatttatgcaagggcatcacggggcttcacgtagacatcgagactggttttcttattgctctattagttcttgcaattcactctgatgtcataccctttatttctcccatctcacaaatctaggtaaaatacggcggtataaatcgaatgtgatggaaaagtttttccccatatgggacattacgacttggcctggaaaccagagggacttcttctaccaaggtgtacacaggcacgaggagtacttaccatgtctgcttctgcccaaaagaccccagggtagacagcccaagaccgtggccatacagggagctcctgggatcggaaaaacaatcctggccaaaaaggtgatgtttgagtgggccagaaacaagttctacgcccacaagcgctggtgtgctttctacttccattgccaagaggtgaaccagacgacagaccagagcttctccgagctgattgagcaaaagtggcctggatctcaggacctcgtgtcaaagattatgtccaaacccgaccaacttctgctgctcttggatggctttgaggagctcacatctaccctcattgacagactggaggacctgagtgaagactggaggcagaaattgcctgggtctgtcctactgagcagtttgctgagcaaaacgatgcttccagaggccacgctactgatcatgataagatttacctcttggcagacatgcaagcccttgctgaaatgtccctctctcgtaacccttccggggtttaatacgatggaaaaaatcaagtatttccagatgtattttggacacacagaggagggagaccaagtcttgagtttcgccatggaaaacaccattctcttctccatgtgccgggtccctgtggtttgctggatggtctgctctggtctgaaacagcaaatggagagaggaaacaatctcacacagtcatgtccaaatgccacctctgtgttcgtccggtatatttctagcttgtttcccaccagagctgagaacttttccagaaagatccaccaagcacaactggaaggtctgtgtcacttggccgcagacagcatgtggcacaggaaatgggtgttaggtaaagaagatcttgaggaagccaagctggatcagacgggagtcaccgccttccttggcatgagtattcttcggagaattgcaggtgaggaagaccactatgtctttaccctcgtgacttttcaggaattttttgcggccttgttttatgttctctgtttcccacaaagactcaaaaattttcatgtgttgagccacgtgaatatccagcgcctgatagcgagtcccagaggaagcaaaagctatctctctcacatgggacttttcttattcggttttctgaacgaggcctgcgcttcggccgtggaacagtcattccaatgcaaggtgtctttcggtaataagaggaaactgctgaaagtcatacctctgttgcataaatgtgacccaccttctccgggcagtggggtcccgcagttattctactgtctgcatgaaatccgggaggaagcctttgtaagccaagccctaaatgattatcataaagttgtcttgagaattggcaacaacaaagaagttcaagtgtctgctttttgcctgaagcggtgtcaatatttgcatgaggtggaactgaccgtcaccctgaacttcatgaacgtgtggaagctcagctccagctcccatcctggctctgagtaagtgcttcggtccctccttgggtagcccgtcctacccggaggccttgactatggtgtcccgggtgtttagggggtcaatctgcaaacctttctgatctctttcctagcctagtttgcacagtacttctgttgctttgttttgttttgttttgttttttgagacagagtgtcactctgttgcccaggctggagtgcagtggtgcaatctcagctcactgcaacctctgccttctgggttcaagcgattctcctgcctcagcctcccgagtagctaggattacaaacgcatgccactgcacccggctaattttggcatttttagtagagatggggtttcaccatgttggccaggctggtctcaaactcctgacctcaggtcatccgcccacctcggcctcccaaattgctgggattacaggcatgagccatcgcacgcggccagtacttctgttttaaaacaaacatatatctacggtgatacatgtttgttttacaaactgtcccagtttgtttaggattaaggagatttctcagacccaggactttgttttactgccaggactgaaggtgttcctgggatataggactttccgtgctaaacctgggagaatactgggcaaaatgagatcccttgttcaccctccctccctctgtgctgcatgcccataaagatgggaccttgcttcatctatcactcctacttctgtttttgagatagggtctctttctgtcacccaggaaggcagtggtacgatcgtggctcactgcaacctcaaccttctgggctcaaacaattctcccacctcagcctcccaggtatctggaatcacaggcatgcaccaccatgcctggctaattttttatttttttggagagatgaggtttccctgtgttacccaggctaatcttcaactcccggcctcaagcaatcttcccaccttggcctcccaaagcactggaattacaggcatgagccgctgcgcccagcctcactcctacttttgtgtatcagaagcttttggtctcaaggaaagtgctgctaatggaacttaacgtgatgatgaagacatcctgaatctgtcttatccaatacaggagccactggccacaggcaaccactgagctcttggaatgtggctggtgtgaccgagtgaatgaacgtttacattttatttaactttactgaatttaaatgtagatagctacatgcagctagtagctaccatatcagacagcacacctctagagggtctttctttccgtgtaaaaa[133 bp omitted]aaaaccccgtttctactaaaaacacaaaaattagccaggcatggtggcgggcacctgtaatcccagctactcgggaggctgaggcaggagaatcacttgaacccaggaggcagaggctgcagatagccgagatcgcgccactatcttaaaaaagaaaaaataataattatatatatatatatatatatatatatatatatatatatatatatatatataaaataaggttgttaaacgtgttaaaatctacaacacactgaataagtccagtccttcatttagtgctcagtagatacaaactgttaccactcatgtaattcctcatcccctccactcgaccaaaactcttccagaagatctttattttggcaaatataatggatttctttttcttaagaagtggcaaaaagcactgactactcatttcttcatattggttgatatttatttggcatttgccatatagcagacacaatgtcaagcacttgctttatgtgaattatttctcccttcaactccatgttgcactggaggtcaggtgtatggagcaccttgtccaaggtcacacatctggtcgaagctaagacgagctaaaatttgacccccgtggctatgacgagaagagagaggcgatttagactgacccctggcgagagaggggacattgtccttctgctgcataatggaaatgccttcttgttccttaactgctctgcgaaaaggaaccacaatctcttccagattcctgtctttccatgaaagactgcataagtcttcagcatatggatgtgtagcgctaatgctcatcctagacatatactgggctagtgtgtggatagataagtaaaagttggtctctccttatgggatgagacatttaaatttcaagtaatttaagttctgttccattcttcaccatgacaagcagtgtgcagggcttctcagccatggctgagtttctccagggcagaggtaagaaagctacagccaggaggccaaacctagctttctgcttgtttaggtaaatacagtttgattggagcccggccatgcttgtgacatattgtctgtgactgttaaccacactgccgcggcaggactgagtcattgccaggaaatttacggccagcaaagctgaatatatttgctacttggtcaattacaggaaaaatttgccaacccctgctctagcatatatttttatttattgtcttattattttttgtagagatgggggtctcactttgttacccagcctggtcttgatctcctgggctcaagaaatgctctcgcctctgcctgccaaagtgcggggattacaggtgtgagccaccgcgtccagccagggcctattttttgttttttgtttgtttgtttgcttgtttgttttgagacggagtctcattctgtcgcccaagctggagtgcagtggtgaggtctcggatcactgcaacctccacctcctgggttcacgccattctcctgcctcagcctcccgagtagctgggactacaggcgcccgccaa[174 bp omitted]atgtatgtttgttagtttgttttgagacagagtcttgctctgtctcccaggctggagtgcagttgcgtgatctcggctcactgcaagctccgcctccctggttcacgccattctcctgcctcagcctccccagtagctgggactacaggcgcccgccaccacgcctggctaattttttgtattttttagtag[155 bp omitted]tcacacatcacatctctaactttatcagcagggatatcacttcatatttcttgggtatgtccctgaaccaaactgagggtcaggctgcttattctcacagcccaataaccagatgcagatgaactgggaaacaagagagtctatttctgtaactgggtacacagggagaaggccaagaaatatcaccagaccaattaaaaattacaaagttttccagagcttatatgccttctaagctatatgtctacgtgtaagtgttcattcctctgaagacgtaagtgattaacttcttctaatctataaggaaggtctgagtcctgaagaccttcctctggagccttagtaaatttacttaaactagatgggtccaggtgctgaggtcattacctttatcttgtctcctgctaaatcatggaggcttggggggttctttcagaccccaataaaacttgtttgtggaggtctggggagtttcttcagacccctaataaaaacttgtttaatcctgaatgggtcctgttgagaattccttcattatcctgtcatacttcaaggcccaggaaaggcctgggcaaaactcttggtggtcttttgttacattccagcctttgtgtgagggcactggctctgtcagcttttaatatttaacttacccactcagtcggtgctgaaactgttgtgatggaggcctgcctgttcagctgctagcgagacctggcctgccacaggtagaatgaattctgttcactcagatattgaatggctacatcagaccatgtttttttcatgtctactcccaacttatgtgggcaattccaacacattccacaaaatcacattcaaggggccctccagtccctgaggaccttttattagggaggggaataaacaccagagcttgttgttcaacttggggataactgttggtcacccgactaagacctcaagaatctaagcacagtgaatcacaatgtctttctatgatgctgcgtaaagacctgacatccgtagaaatcttaagacacgacatatttctttcatgttggttagtccattgatcacttttgtatgggttcctgcagggagttgatatcattcctacttatttgcatttctatgtatttgacggatgtgaaaatggatgaatctatttcatgggatttaaattttatgcaaaaattacgctagtgtaaatattctaaaaattgctttttcatctcatgtgtcttggcaatgtctatacatgccattttcaatgaagtattctttgaaaaataggtgtgctagagatgat[135 bp omitted]cctccgcctcccaggttcaagcgattctctttgcctcagcctcccaagtagctgggattacaggtgcccaccaccacacctgtataatttttttgtatttttagtagagacagggtttcactatgttggccaggctggtctcgaactcctggcctggtgatccgcctgccttggcctcccagagtgctgggattacaatgtgagccaccgtgcccggccactttcaactatttctttaatgcaaccaacagcaatcttcacatgtgtatcttggtcagcctctctgaaacgattgtatggggaagaatgaaagagaaagtcagcaggtccttctacggccaaactacatgccaatctagctctggatttttctttcttgtactcactgtgtcaaaaagattaatttttcctttattctgatcctatatttttttaaaaaataagaattatatatacacagggtaagaatgtaggtacagaatataattcaatctctgccccccacataaatctcatgtaattaaaaaagcaattcctggttaggcacggtgattcacacctgtaaccctagcactttgggaggccaaggcaggaggagcgcttgagcccaggaattcaagaccagcctgggtaacatggagaatccctgtttctacaaaaaatacaaaaatcagtcaggtgtggtggcgtgtgcctgtaaccccagctcctcaggcagatgaagtggattgcctgagcctgggagttagaggctgcagcgagctgtgttcagaccactatactccagcctgggcggcagagtgataccttgtctcaaatataaataaataaaaaataaaagcaacttccttttttccaagtcatgggaaaatacagggctcttatttgtgaccatgagtctccctggaatgaaatgagaaacctcgtgatggtttttctgagtgctttatttaaatgaggatgtcttagagtcactagaggcctatggccctaaccaggatagggaacaccagccctggggtttcctagtagattttctccagtttaacgaagaggtgttttctctcttctcccttccatgtagagcgccagagagcaatgggctgcatcgttggtggcaagacttatgctctgtgtttgcaacgaatgataagctggaagtcctgactatgaccaacagtgttttggggcctccttttttgaaggctctcgcggccgcactgaggcaccctcagtgcaaactgcaaaagctactgtgagtataacacaaatcccactggaaggaactttatggagatggtctgtttcccatccactttcttcattccctctccactcacactagacttccggaaagcacccatgtccagccttggacggaggtgcaggaggaatgagtcatggggtgcgtggtgaaggaaaccacacacgggagccaggctgacggctcgatctgtctctagttactgttagcttggtgcaaatgccattgcagtttttgccattagtgacatttgcaccaacttaatagctctgtgtccttaagtgaatggtgtacacagtgggtcacggaattcctgacatctccctggtgcacttcaatgcgcccatccataaaatgttcagcccggtgctgtggctcacgcctatttacttcagctcaggtgttcgagaccagtcccagctacttgggaggctgaggtgggaggatcacccgagcccaggaggcagaggttgcagtgatgttgagccatgatctggccactgcactccagcctgggtgacagagtgaggccctgtctcaaaacaaactataaataaataaaattaaatgatcatcacgacagagagatgaaatgcagtcccgcacgtgaagcccacaggaccgtacctgaagtggaatcagcacactgtgtaatccagggtgtggtggttactctctggagggacaccgccttacagaagccacgtgcgacctgagcactgagtatggttcaccgctgcattcctttgaagtattaatatgtactattatccccccccttttttaaaacagagtctcactttgttgtccaggctggagtgcagtggctggatctcagctcactgcaacctccccctccagggttcaagcaattctcctgcctcagcctcccgagtagctgggactacaggaatgcaccaccatgcctggctaatttttgtatttttagtagagatggggtttcaccatgttggtcaggctagttttgaactcctgacctcaagtgatctgccctcctcggcctcccaaggtgctgggattacagatgtgacccaccatgcccagcccccattttttagcaaagtgagagctggagaggttaagtgatttatctaagatcctgtggctgacaagccttaggtaaatcactccaaggcagacagccttaagctcgtcttccccaacactctgtgcttctctaacacaccactgttagcaggtgcctgcgtggggtaagcctcaccaaagagggcacatttgaactgggttgggaaggatgagatttacatggaagaggagaaacactacttcattttttttccaggtggggtcttgctctcttgcccaggctggagtacagtggcatgatcatggcttactgcaaccttgacctcctgagctcaagcaatcctcccacctcagcctctcgagtagctggggccacaggcatatcccaccattgcccggctaattttttttttaattttttgtagagacaaggtctccctaggttgcccaggctggctttgaactgctgatcttaagtgatccacctgtctcagcctcccaaaatgctgggattataggtgtgagccattgcaaccagccactattttttataatgtaagagtgagcgtgtatgcgttgcccaccgtctgctaggctatcttaggttctttgcacatgaatgctcttaaaactcatcccaagcagtaggtgtccctatttcacagatgagaaactgaggcatgagtttacatcattactaagcagtcaaatctggctctagaatcagttctcttagccaccactccatacgctatctctccagagtttttaagatccaaaaacccgataattcaccatgtgaaccactggccccttccttgaaataagccaccaggcatcacatggcccctggccattatcagatatattttctctcctattattgtgatagttattattcgctcctgcttactgagtgcgtactatgtgacaagcaatgggctgagaatttcatgggattaattctcacagccattctaaggagaaaatgtcgtatgctctcccttgtagacctgaaactaaactttagagaggttacgtgatttgtgaaagatggtgcgactagggatgttaagctgagaactcagttctgaattccatgttgcacagaacgggcccctccttatggactgactgaatgtagaagaaatagccggtcgggcgtggtggctcacgccggtaatcccagcgctttgggaagccaaggtgggcggattgcctgagctcaggagttcgtgaccagcctgggcaacacggtgaaaccctgtctctactaaaaatataacaattagcttggtgtggtggtgcacatctgtaatcccagctacttgggaggctgaggcaggagaattgcttgaacctgggaagcggaggttgcagtgagccgagattgcgccactgcactccagcctgggtaacaaagcaagactctgtctcaaaaaaaaaaaaaagaaaaaaagaactagttagccacctccgttgtggtgatggcatcacgaatatatgcatagtccaaactcatcaaattgtatatgttaaatatatgcaggttttttaatatcaaatcgattatacctcaaggaaactgtttttaaacaactaattagaaagaaagagattcagcagtgaacataagcattagaggtgcaaggcaaatctgtgtccctggttttagaaaaggcgtgtgatggccaggagtggtggcccatgactgtagtcccaacactttgggaggctgagccagtaggatcacttgaggccaggagtggaagagcagcctggacaacatagtgagaccccatatctacaaaaatttttctaaaaagaaagtagatcagaaagttgagctttgtaggccgggtgtggtggcttatgcctgtaatcccagcactttgggaggccaaggcaggcagatgacttgaggtcaggagttcaagaccagcctggccaacataataaaatcctgtctctattaaaaatacaaaaattagccaggcatggtagtgggtgcctgtagttccagctacttgggaggctgaggcaggagaatcacttgaacctgggaggcagaggttacagtaagctgagatcgcaccactgcactccagcctgcgcaacagagtgagactccatctcacaagaaaaaaaaaaagctaagctttgttattaaaataaagaaatataaataaaaattttaaaaccaaaagcatgattttaggagagtgcagggaaaaccagtcctccgaatccttcaggaataggatgacgttccctttgctttaagaaagcctttgtagacctcagtccaatcgaattctgatcctgtgagtcatttatttttttaaattttttttattatactttaagttctggggtacatgtgcagaacgtgcaggtttgttacataggtatacatgcgctgtggtggtttgctgcacccatcaactcatcatctacgttaggtatttctcctaatgctatccctcccctagccccccacccccccagaggccccggtatgtgatgttcccctccctgtgtccatgtgttctcattgttgaactcccacttatgagtgagaacatgcggtgtttggttttctgtgcttgtgttagtttgctgagaatgatggttccaacccaaatgcccatcaatgatagactggataaagaaaatgtagccattcattttgacttacagttttcccaggataggacctgaataatcacaggtttgtgtcactctttaatgtctgcatcctgaattcagttgtaaaccccctgagagtgggactgcacctgtcccacgtgcagcttccgggagcctcgtttgtgaggccacagaattctacgactgtggacgggaccctattccaaggagacgctcttccctctccagcctaaggcgtgtgaatagcaccatgttgaaccaggacttaatcggtgttttgacggggaaccagcatctgagatacttggaaatacaacatgtggaagtggagtccaaagctgtgaagcttctatgcagggtgctgagatccccccggtgccgtctgcagtgtctcaggtgagatttgagaggggggttagagtgggaaccggggtacccggatggtcttttcaagggcggtgatgagaggctcagtttccctctgtcctttcctttgatctgctgttggctttgttcaactttaaaagtacaatttgggccgggcgcggtggctcacgactgtaatcccagcactttgggaggctgaggcgggaggatcacgaggtagagaccaacctggccaacatggtgaaactccatctctactaaaaatacaaaaaattagccagcgtggtggcaggctaatctcagctactgtaattacgggctgtaatctcagctactcgggaggctgaggcaggataattgcttcagcccggtaggtggtggttgcagcaagccaagatcgtgccattgcactccagcctgagcgacagagggcgactctgtctaaaaacaataaaaataaaaagtgcaatttgaccatgctctagatccgtctgataccaggaaatctgagccccagctcctactggattgcaaaagctggatattttctaactttttattttaatttttgtgaatacatagtaggcatatatatttatggggtacgtaagatgttttggttcaggcatgcaatgtaaaataatcacatcttggagaatgggagatctagcccttcaaacatttatcctttgtattacaaacaattgatttatacttttagttattttggaatgtacaatttattattaactatagttcctctgttgtgctagcaaatactaggtcttattctttttcaacctgttaacccgtttatgcccgaggctgcaattttttgaattttttcaatcagagtttggtgatgaccttgagcagtgagatataaataactcccaagtgcttagcattccaataatggaatcctaggcataaatggttttaaccatcctgaccttcccctgctctccaccctcccactacccttcccagcccctggtaaccatcctcctactctctatgtccatgagttcaattgttttggtttttagatcccacaaataagtgagaacatgctgtttgtctttctgtgcctggcttatttcacttaacagaatggtctccagttccatccatgtcgttgcaaatgactgaatctcattctttttcatggctgaatggtactccattgtgtatatgtaccacattttctttatccatttgtctgttgatggacacttaggttgtttctgaatcttagctattgagagcagagctacagcaagcatggtagtgcaggcatctcttcgatggactgatttcctttctttggggtatataccagtggtggatggctggatcacatggcagcctgaaagagctgatttttcatcattcaggaatttcatgagccagttgttaaacaacgtttttaaaaattaaatcataggcttacaaatatattaaacaacaaaagtcatagattatcaaaatgcattgtttcctaatcattttatggttcattattatcactgctagggtgcagcaaactttttctatgacaagccaggtaagaaacacttctggcctctgggcccatgccatcatcatgatgactccattctgccactgcagtgctaaggctgccggagttcgtaggtaaacaaatggatacagctgtgttccaataaaactttatgaacactgaaacatgaatttaatataattttcatatgtcacaaaatattcgtttaataatttttttaaccatttaaaaatttttgtggcggctggacaccgtggctcatgcctgtaatcccagccctttgggaggctgaggtgggtggatcacctgaagttgagagttcgagaccagcctggccaacatggcaaaaccccgtctctacgaaaaatacaaaaattagctgggtgtggtggtgcgcacctataatcctagctactcaggaggccgaggcaggagaattgcttgaacccgggaggcggaggttgcagtgagccgagatcacgccattgcactccagcctgggcgacagagcaaaaactccatctcaaaaaataaaaataaaataggccaggcacggtggctcacgcctgtaatcccaacactttgggaggtcaaggtgggtggatcacctgaggtcaggagtttgagaccagcctggccaacatggtgaaaccctgtctctactaaaaatacaaaattagccagttgtggtggctcacacctgtaattccagctactcaggaggctaaggcaggagaatcgcttgaatccaggaagcagaggttgcagtgaggcaagatcataccattgcactccagcctgggcaacaagagcaggactctgtctcaaaaaataaataaataaaataaaataatgttttattagaaaacattcttggttgatatgctgtagaaaaccaagtggcactccagaggaggcccacgagccactgcttgccagctcctgaccactgccctggggctgccattgtctaccatacccatttggtggaaacatgatgtcatggtgcactactctgcacctcctcccactcctcgctcagtgacctcccactctgagctgaaaatcagccatggcagaggcatttacccaacaggcactggcaaacactgcacaccaggactccctcttccagaatggcagtggttagacatttactgccacacacctactcagactgtacttttttggtttgtttgtttatattcataggttttagggtacaggtgatttttggttacatggataaattctttagtggtgatttctaagactttagtgcacttgtcacccaagcagtgtacactgtaccccatgtgtagtcttttatccctcacctccttccaaccttcaccccaaccacaagtccccagagtctattacatcattcttatgcctttgcatcatcatagcttagctctcacctgtaaatgagaacatacgacgtttggttttccatccctgagttacttagaataatggcctccagctccatccaagttgctgcaaaagacatcatttcattcttttttcatggctgagtagtattccatggtgtgtctataccacattttccttacccactctttggtcaatgggtacttaagtgggttccatatctttgcaattgtgaattgtgctgctataaacatgcatgtgaaagtgtctttttcacataaagacttcttttcctctgtgtagatgcccagtagtgggattgctggatcgaatggtagttccacctttagttcagaccccactttccagcctttccatgtgcgaaccttctctcaacagaatttgtatgacctctcattttgttttcatctgccagcgttgctcctttacatccaacagagttgaatgtagcttggataatctccgcatttcattacctttcttgcacagaacagaaagctcaggtggctggaacctggaggtggtaagcacaatgcttcactgaatgtctttatataaacagcccaccttgaggccgaaatccagcccgagaagacagtggctgtgagactcaggaaaccttctctaacgtcactggatctcagttcttcaccttgatgatgactggcagataaatgcacaaagtgtgagttagacaggagaaataagcattgaggtctattgcacagcagggtgactataactaataataacctattatttcaaagttgctaatggagtagatttttaacattctcactacaaaaatgattaaattggtgagatgatggatgtattaattagcttgattgatgccttctataatatacacataaatgaaaatattacattggaccctataaatatacacaattatatttttccaactaactttttttaaaatttgtatttcaaggagctgaatggaaatagttagagctcagtcgttattgtattccagttgatgacagccccaagagtgtgttggtttttgctgatgacttgggaggaagttcctgagcttggtgcaggtgtgctggccggaaagttggaaataatcccccgagtctctgctgtgaagactgagacatgagacagtggaatccaggaggtcctacaggtaccattttccccagaaccatggctcagcatttgtatctggcttctacaggttggaagactgcttggccacccctagaatttggactgatcttggcaataatcttcaaggtaacgggcatctaaagactctcatactaagaaaaaactccctggagaactgtggggcgtattacctgtctgtggcccagctggagaggctgtcgtaagtctcctttctagtggctgtggttgtggttgtggttgtggtggttgtttggtagatttagtgcttctgtgagaaaagaagtcatagggaaggtacatgtataggagcaaacataagtcttgtgattgatgtaattatatagataggtcaataagggtccagccaagaatgaaagagaaataacatatctacataaaagtacggatttatacctaatattctatatcaagcataatgagtcctatgtatccatcatcccgtttatgaaatagaactcatcagttctgttttcgcctgtcctcactggttttattgaccctgcccccgaccccactgtgatgacatattgaatcaggttgatcaggctccttaatttatgtatagtattaatattactacccgtgtatccttaaacaggcatcacatcg[136 bp omitted]accccatctctactaaaaatacaaaaattagccaggtgtggtggcacgcacctataatcccagctactcgggaggctgaggtaggagaatcccttgaacccaggaggctagaggttgcagtgagccgagatcgcaccactgcactccagcctgaatgacagagtgagactcgtctcaaaaaaaaaaaaaaaaaaaaggattttacataaaagtatcacctgtgatgtgttttttccctgatctatatcttagtgttcatctgtttagttgcttctatagttaattcctcttcactacagaatgatattgatacgaagatccaagaatttagttattcattctactcacagttgagatttgggctgtttctaattgttggctacacacagacacacacacacacgcacacacacacactgtgatgaacattctaagaaaagaattgcagggccttggtgagtgttcatcttcagttttagtaggtttgtttccagagtgtacgaattggccagagcaatgggtatgaaggtgctcctaactccagatccctatccaagtcttactattatcagtattgttgttactgttattgccaatctgttgggcaggaaatggtaccttatggttttaatttgcatttccttgattactagcgactatttttttatcatctgactgttcatcttagtttatctgatttgcatgtcttcccatgtatttaatgcgtctttccttttttataacttccgaaattatgtctcttcctcagccgtctccttgtctgctatttattctttgatggtctctttctcttctctcttaatcccatatatttattttctatgttttaattttttttttttttttttgagacagaatcttgctctgttgcccaggctggagtgcagtggtgtgatcttggctcactgcaagctctgcctccctgcttcaagtgattctcctgcctgagccttctgagtagctgggattacaggtgcctgccaccgcactcagctgctttttgtatttttagtagacacggggttttgccacgttggccaggctggtcttgaactcctgacctcaggtgatccacctgcctcgacctcccaaagtgctgggattacagatgtgagccactgcacctagtctttttttttttcaggttttaatttttatttcaataagttttggggaaacaggtggtgtctggttacataaataagctttttcgtggtgatttctgggatttttgcacgcccaacatccgagcagtgtacactgtacccaatgtgtagtcttttatcccttgccaccccccaccctttcccccaagtccccaaagtccagtctgtcattcttatgcctttgtgtcctcatagcttagctcccacatatgagtgagaacatacgacgtttggtttccattcctgagttacttcacttagaaaaatagtctccaattctacctgggttactgcaaatgccattattttgttcctttttatggctgagtagtattccatggtgtgtgtgtgtgtgtgtatgtgtgtgtgtgtgtgtgtgtgtgtgtgtgacattttctttatccacttgttgttttatgggcatttgggctggttccatattttcgcaactgcaaattgtgctgctataaacatgtgtgtgtaagtatctttttcatataatgacttcttttcctctgggtgaattcccagtagtgggatcgctgcatcaaatggtcactctacttttagttctttaaggaatctccacactgttttccacagtggctgtactagtttacatttccatcaacagtgtaaaagtgttcctttttcaccaacacctttctttttattgtttgattatagccattcttgcaggagtgaggtggtattgcattgaggtttcaatttgcagttccctgatacttagtcatgtcaagcatttttccatttgctttttggccatttgtgtatcttttaggaattgtctattcgtgtccttagcccactttttgatgggatttttttttcttgctgatttgttctttgtagattctgaatattagtcctttgtcagatgtatagattgtaaagattttctcccactctgtgggctgtctgttaactctgctgattatttcttttgctgtgcagaagctttttagtctatcagttttattgatccacaatgccttcatcccaccattcccacatcgaagctgctgtcctttccttgaaagcttggaagtcctgagtggtgatgacagaggtgtgaggatgcttctgcatccagagggagagccctgactgagaagatcacccttctgtgtgagacaaagacccctctccattcagtcatctgtgtgcttctctcccataggatagagaactgcaaccttacacagcttacttgtgaaagccttgcctcctgtctcaggcagagtaagatgctgacccacctgagcttggcagaaaacgccttgaaagatgaaggggccaagcatatttggaatgccctgccacacctgagatgtcctctgcagaggctggtgtaagtcccagaatgttttcttctctgaattccctggagcagaacagggtgatgaagagaacctgttatatattcatttatgtcacatatttattaagtgcctactgcgtgttaggcatggtgctagcactgaggggaaaagcacaataaagaggagggttattatttctgattcagggacaagtgatctagaggcagagttctcaaactgtgtaccaagacacccaggagtgaactcagaaggactgcagggtattttaaatttaaggaatattgagatctatctgttcatcactgtaagaacgactacctcgaggtgtaagaattaaagaaagaggaaagaaacacaaaaggtggcttgacagttaaggacaggtttattttagagaaaacagacctgagaggggcttctggccgagttaggtcagagctacactctcttatagactaagagtttttaaagattcagggtgggaatatttatcagaggcttggactgcttctgtgactcttggttgtgcttatctgggagggagagttgtgtgtctgttcccatacatccttctgcagctgcaggcatatcccctgagtctgcttttagcttccctatcttagtgcacctgaagggaaaggaatgtgctattaaggctcactgttttgggaggcctgtaatcccagcac[133 bp omitted]gaggcaggagaatggcatgaacccgggaggcagagcttacagtgagccaagatcgcaccactgcactccagcctgggcgacagagtgagactctgtctcaaaaaaaaaaaaaaagaaagaaaaaaggcccattgttttactggggctcgtggcatgaatgtgaagtttggcagttacccgagagactttccccccacctccctctgtgccctagctgtcttatctgtgttttactgtctgttctttctggctgcttgtaattaggagagaaatgatttccttgaaatgcatgaggttagaaagggagctggaacttaaagtgccagtgtctgtccgagatcacggtgctcctgctctgtcacgaggtagttcattttcacagcttgaaatcagccatggcagaagtgtttgcaccatggaaactggcaatcactacacatgagggcttttgtttgtttgctctagagagctggtttactaggacatcaccgaaccataaccatcgaatcccctctttatttcttgtctcacatgagaatatgagctgctaaaaggcaggggctctgcctgcgtgaattcccatcccctaattcaatgccccaagcatagtaactctcagcaaatgtttgtgaaaggcaagaggtggcgcaaaataccccctgaaacactgatactgttagttctccaaaaagaagcagggaacggtgccactgctttggaaagcagctttggcagttcctcaaaaggtgaagcacagacttaatccgtgagccatcagtcctgctagtaggtgtatccacaaaagaaataaaaacccacctccacatgaaaacctgcacacagttcacagcagcattattcatagtactcataatacccaagacctggaaacaacctgtgtctgtgccctgatgacggcataaaggcagtatggtgtattcacgcaatggaatgttatttaattgttaaatgaaatactgattcatgctacagcatggacgaatcttcaaaatattatggtagataaaagaagctaaacgcaaaaagtcacatattacatgattccatttaaatgacatgccaaaaataggcaaatccagaaaaagaaagcaaattagtggtgttagggttggggtgggttgggggaggaagtgagaagtggcttctaaagtatccagggttttccttaggggtgacaaaaatattccaaaccgaacttacacaaatattctaaaattgtggtgatgatcatacaactttataaatagactgaaaaccaatatttggtacactttaagtgggtgaattgtgtgatatattaattgcatcttggttatgccattatgcaaaaacaaaaaacaaacaaacaaaacaaacaaataaaaacagaacccaaaaacaaagaagtaaaacctaagggtgttttcgttgttgttgttgttgttgttttgttgtagttgttgttgttgttgtttttaacctgtgtttctttgcagactgagaaagtgtgacttgacctttaattgctgtcaggatatgatctctgcgctctgtaaaaataaaaccctgaaaagtcttgacctaagttttaatagcctgaaggatgatggggtgatcctgctgtgtgaggccctgaagaaccctgactgtacattacagatcctggagtaagtggcccctcgtctcctcctgtgagaccaggagaattgtatataagcgtctctcaggatggaatatataacaggaaagggctgtctttttaagtttctggattgttccctccattgaattggagaactgggaagcttctgagccgtggttctcaaagtgtggatcagcagcagtttcgcctgggcaggacacacacaaattttggggccccacttcggacctagggaaccagaaactctgagggtgggatgcagcaatctgtgttaacaattgttttaaaaaatattcttccagttgaataaaagataacaaagagtttgtcacttttagactgatatctgagatgactggtctgaaattgaattttacacttaggagatatatatatacacatatatgtatataaagatacatatataaatatatatgtatataaagatgtatctaaagatacatatatatgcatatatatgtatataaagatacatgtggccaggcgcggtggctcacgcctataatcccagcactttgggaggctgaggtggggcggatcatgagatcaggagatcgagactatcctggctaacacggtgaaaccatgtctgtactaaaaatacaaaaaattagctgggcgtggtggtgggcgcctctagtcccagctaatcgggaggctgaggcaggagaatggtgtgaacctgggaagtggagcttgcagtgagccgagatcacaccactgtactccagcctgggccacagagtgagactctgtctcaaaaaaaaaaaaagatacatatatacatatatatgtatataaagatacataagatacatatatacgtatatacgtatataaagatacataagatacatatatacatatatacgtatataaagatacataagatacatatatatatatatgtatataaagatacataagatatctgcatatgtgtacacatatatgtacagacacatatatacttattttataaatatttatatgtagatacttattttatatattatacatataagcaatatattatttatatataagtatatataaatatataaaataaatacgaatatattatatgtaaatatatgtaaatatacaatatattatacattatatacttacatattatgttgtatattatatatttatatatacataatttatattatataaatatatgtattatatatttatatataatattaaaatatatattaattatattaatatatttatatatgaaaatatataatgtatatatttccctgttttttgtggtctctttgctaacatgtataccagccagtgatataaaagcattcgttctgtttttaattctttggttaccttaagtatttggaaaagacttgtaaacatctcctctcatgatcaaaaaatgaatctaattttacctctttcaatccaaattttttgctctccattagcatagtcttggtatttaatctagctcatttaaattattgtcttgtagaacatctttcatttccaggattagtttggataatggtgttcatttttgttgatgatttgcttctcaaatgaaattcagtatgaattcactgccagtcatgattctttgatgcctcaaatctagtttgggttttaaatgttgatttatctcttagattgagtgaaatatattttcaggtagaaaagaactttctacacttgaaagtgtttatgcagtattttctaagcctttgcttgtatgagattattattatttttttcagatcacaaaattaattttatgtttccagtatacctgtggggctaacaagacagttatctgctttgggtccttttcatccacctgtcccctttgggtttgctgtttaatttaattttttttaaatttttttattatactttaagttttagaggggggagggatagcatttggagatatacgtaatgttaaatggcgagttactgagattattttttaatctagttttggtcatgagcagtaacttggctcagtgtaaaattcatggaccctatctgtcttagtctgttttctgctgcttataacagaatacctgaaattgcatgacgtataaagaaaaggactgtggaggctgagaagtccaaggtggaggggctgcatctggtgagagccttagtgctggggggattctctgcagggtcactagtgagtcactgagcatgctgtatactggctcagatctctttccctcttcttatacagccactcatcccactcccatgataacccgttaacccattaatctaataatccatgaattttactctttgttcaaggactcttatgggccggcatcgtatttatgatacacggcacctctttgagacatggtcacttatttgtagatgtgcctccccaacttttcagtgagtactgtgtgggagggcaaagtgacttacttatagaaggatttgagctgggtgtggtggcatgtgcctacagtcccagctgctagggaggctactaggtagtaggattgcttgagccaaggaatttgaagctacagtgagtcagggtcacaccactgcactccagcctgggcaacagagtgagactcagtctccaaaaaaaatttttttttaaaaagatccaaacacctggcccattaggacaataaaaccatgctatttgaatacatgtattttgttacctgtctcctccctcaataccctgcccagtcaactgtgagttacaggaaggcaaggatggtgtgtgttgctcactcttgtgtcaaaaatgtccactaggtagaatcaaatatcttttgaatgaatgaagataagtaggtacaagccattttcgaaagatatacttggctcataaattcttagagtgaggaatactatagcctgctctgaaatcaccaaaaggacacaaagaaactgattgactataggtgaatagaccatagttggaacaacattacacattcctgtcagtgtgatttcttggctgtaagccgtcacaccggctgagctctcagatgagttgtgatgacttctctgctgtctgctgtctgtttctgtgtcacaggctggaaaactgcctgttcacctccatctgctgccaggccatggcttccatgctccgcaaaaaccaacatctgagacatctggacttgagcaagaatgcgattggagtctatggtattctgaccttgtgcgaggccttctcaagccaaaagaagagagaagaggtcattttgtaagtctccaccgggtttcctgtgcaaaacctaccacacaagagaagctccttgtaaaacgtgagatgctgggctgggtgtagtggtgcatgcctgtaatcccagcactttgggagactgagacaggcagatcgcttgagtctggagttcagaccagcctgggcaacattgcaaaaccctgtcttctactaaaaaatagaaaaattaactaggcatggtggtgcatgcctgtagtcccagctactcaggaggctgaggtgagaggatcacttgggcccaggaggttgaggctacagtgagccatgatcacaccactgcactccagcctgggcaacagagtgagaccctgtctcttaaaatagaaagtgagattgtggacctggaatgctattgtttcaggtgttgctaccattctgcttttgtttcctggggatttatatttcccttaatgtagctgttcaaacccccaactcccacttttacctaaaggaaccattaactgggattctcctatctgatatcttctttcttgtctttgtcttctcttttcttcatttcttcaccttttcttcctgaacagctgagtttgttatcacttaccagctatatagccatgaacaagttaatctttctaagcctcaatttgctaatctataaaattgggatggtgtcttctcccatggagattttataatgactgaaagaaaagtcgcacatacggcacttaacacagtgcctaacacatgttctcaaccagtggtgggttctgggtgaaagatacaatttttcctggtgtatgagttgtctattgctatgcagtgaattacctcaacgcttagtaacttaaagccacataaaggcgtattgtcttacacaatttctgagggtcagaaatacgacagcgatgtaactgggaggttctagctcatggtatctcccgaggtctcagttgagccactggctggggtttgatgagggctgttgaatctgcttccaggctcacttgtgtggctgtgggcggcgggggggcctcagttgttctccagggagttgctcatgacattgcagctggcttcctccagaacgagaggctgagagaggcagaggcagagggagatggtggcagagagagatgactgacagctcaaaacagagccacagtcttttattacttaatcttgaaagtggcgtcccatcacgtctgccttgttttattggccatggtccagccctggtccagtgagagagggagccatccaagggtgtgatttgtaggaggagggatcatgggggctgtcttggttgaaccccaaggcactttgaattcattcctgagctcctaagagtgctcctatttgtcttgacctactgcatggggccatggtggtctcctaggtggtaaatttctgttctagaggttctgtctctttgttttggggctgcaaaagaaaaccaaatgtaagaaaacaaaaccttgtttttatccttcccagggagaagaaagacagcaatgaagtggatatgctggcaagactggagggccctgtagtggaaggagacttcctgaagataatacaggactggaattcttagtgctgtgatgaagcaatagagatgaatcgatctggaccctctggtgactgatctggtggccctctgggtattttttttttttcctaatgagaaattgggaaacagttgcctattttgtgggccgtcctgactctggaatggctccattcgttctgggaactggtgtagggcatgacctccaaatagctccatcaatgttatggagtgtcatgtgttaacacatagattagtcactgcattgggggcaccaaggtaaggtgagttccaacccacatctactcctggctaccagaatgtctttgaatatgtcatgtaaacatctcttggagatatgtcttcatatcttcaagggtattagaaaaatttaattaaaaatatgcatgaatgcaatttgaaattttttagagtgtgatttatttaccaatagactggtccatcaactgttaaggaagaaacctgttcttaacgtgtctggggaaagtgtgcacaaggaacttctaaggaagataataaatgtagcaagtactggaaaaaggaaatcacctcatgtttaaggagctctaaaaatgaagtgtaactcttaactttttaaggtcctaactaactactacattcttaaattagttatggcagcatttaaaactcaaagatctagaaagcaatcacaatgttttttttccccttctgaaacagccatctttttacaatgtaatgatcaggtatcatccaggttggtttctcttgttttttgtttttttttttgagatggagtctcactctgtcaccacactggagtgcagtggtgtaatctcggctcactgcaacctccacctcctagcttcaagtgattctcctgcctcagcctcctgagtaactgggactacaggtgtgcaccaccactcccagctaatttttttgtatttttagcagagacagggtttcaccacgttggccaggatggtcttgatctcttgacctcgtgatttgcctgccttggcctcccaaagtgctgggattacaagtgtgagccactatgcccggcccaggttgatttcttaattctgaagaaattttatttcaaaagccagagcagttggggtcttcaacctccaccctagcaatcccactgctaggtatataccccaaagaaatcagtaaatcagagagatatctgcacttccatgtttattgcagcactattcacaatagccaagatttggaagcacctaagtgtccatcaacagatgaatggataaagaaaatgtggtacttacgcacaatggagtactattcagccatgaaaaagaaacttaagtgtagaaacaatggtatcatagaaacagcacactggtgctcaggtattgttttctaagtaccgttcctcattaaaggaaccaagaatcttcagagaaagagctgactccacagttggtgctgggaatgtacagaatgggcttggaacatcttgtgccagaagtaagacaatgctcagagaacaatgggggccaggccagtggcttgcacctgtaatctcagcactgtgggaggttaaggtggagagttgcttgagcccaagagttagtgaccagcctgggcaacatagggagtccccatctacattaaaaaatgttttacaaatcacctgggcatgatggcgcatgcctgtggtcccagctatttggggggctgaagtgggaagatcacttgagcccagaatctcaaggctgcagtgagccatgatgcatcactgcactccagcctgggcaacagagtgagaccctgtctctgaaaaataataataataatggggacatagcaataggaacaaggagcctgattgaatgagttcccaccggccaaatctggaataatttaatgatcaaaccaaataatggtagaaatgtggatgacagtcgtgagaccttggttcttgtcttcatttaaaagaatttaaacaacagatacacagcaaaggagatgcagcatagggcaattgcaaaagaaaaagaatattttgaaagtaggccaggtgcggtggctcactcctgtaatcccagcattttgggaagctgaggcaggtggatcatctgaggtcaggagttcgagaccagcatggccaacgtggtaaaaccccatctctactaaaaatacaaaaattagccgggcgtggtggtgcatgcctgtagtcacaggtacttgggaggctgaggcaggagaatcacttgaacccaggaggtggaggttgcagtgagccaagattttgccactgcactacagcctgggtgacagaatgagactccatctcaaaaaaaaaaaaaaaaaaaaagcaaataaatgaaagacgaaatgtggtggtagagaaaccatcagaaggtgctgaaaccagtagatggagactcgatgtactcacatgagtctttaaggttctccccagaaactacatgtgaattacaaagtaagagtagtgggaaaacagggtagattgtgccttagccaagtactcaaagttaacatcaccaataagaagacaaatggatatcatgtgcctgtggatggaacgtgctgagataaacacagcagggcctcagtgacatgacagaacaagaacacaaagttggcaggaactatttcagattcaggaagaccaacctagtagatgcaaaaaaaaaaaaaaaaaaaaaaaaagataaaattcaacatcaatttgcaatttttaaaaaacacttggcaaacttggaaccgatggtgacttatttaatttgaggaagggcttctaaaaaattactgctaacatgcttattgttaatttaatctaatatttcactatttgtgaaaattctttccctaagataaaaatgagagcaaaaaacccaaccactattacaacttttatttaactttgcactggaggtcctagtcagtgtaacagggcaacaagaggaataataaacacaacattataaagatggaaataaaactgtcatttttcacaaacaatgtgattacatacatagaacaagaactgataatcctggtaaaccctggggattaaaaaataataattaaaaagtgaattagtaagatcccacacacaacaactcgatatatgaaaataaaatgtattactatgtactattaagcagtttttaaaagcataaaatttcttttatactggtgtcaataatctcaaataggaataaacaataacagttgtggccgggcgcagtggctcacgcctgtaatcacagcactttgggaggccgaagcggggggatcacctgaggtcaggaatttgagaccggcctggccaacatggagaaaccccgtctctactaaaaatacaaaattagccaggcgtggtggtgcatgcctgtggtcccagctacttttgaggctgaggcaggagaatcccttaaacctaggaggtggaggttgtgttgagccgagatcgcgccattgcactccagcctgggcaacaaaagcaaaacactgtctccaaaaaaaaaaaaaaaaaaacaacagttgtgccatggccaggcccagtggctcacgcctgtaatcccacccctttgggaggccaagtggggaggatcacttcagcccaggagttcgaggctgcagtaagccgtgcttgcaccactgcactccagcctgggcaacagagtgagaccctatctcaaaagaaaaaattaaagaatacctaataaatggagaaatatacaaacttcatgaatgggaacactgtctttcaaagatgacaattttccttggctgtatgcataaagttattgcaattaccataaaattcccaaagtactctagtggaaatttacaagcaaattctaaagtatatgaagaaatgtggccaagcgcggtggctcacgcctgtcatcccaacactttgggaggcccaggtgggcggatcacaaggtcaggagttcgagaccagcctgaccaatatggtgaaaccccgtctctactaaagatacaaaaaattagccaggcgtggtggcgggcgcctgtaatcccagctactagggaggttgaggcaggagaatcgcttgaactggggaggcggaggttgcagtgagctgagatcatgccattgcactccagcccaggtgacagtgtgagactctgtctcaaaaaaataaaaatgaaaaagaaaaaaaagaaatgcaaagagttcaggataactagcacagtatggtattttccatacatgtaattagagattggagaaatatactagggaaacagaatagagtccagaacagaagggcataaacatgatcacgtgacttctgacaagctgacattacaaaagactagggaaagggtagtattgtaacaaatggtgctaaattgattgttcctacatagaagaaaaaatctgaattcctacctcataccatatacaaaattaattccaagtatagtataaatctaaatatgaaaggaaagacactacactttctaaaaactaatcagaagaccttcatgacctaaggagagaccataaattttaaaatgcattcaccataa[144 bp omitted]tctattaaaaatctgaaaattagccgggcatggtggtacacacctgtagtcccagcttctcaggaggctgaggcaggagaattctttgaacccaggaggtggagtttgcactgagtactccagcctgggtcacagagcaagactccacatcaaaaaaaactaaaaataaatacatgggactttatcaaaagtataaacttctgtttcaagattactaagagagtacatttcaagtgttctcaccacaaaaaaataagtattcaaggcaatggatgtgtttgttagcttgatttaatcatttgacattgtatacatagaagatcacaccggaccccaggaaaatatacaattataatttgtcaatacacaaaaaattaaaaaatgccaagtgcaacttccagattatgtaaaataagggcacccaacacacactcacactcacacacacactctatcatacacagtctctcacacacacacactctctgtctcacacacattgtctcacacccactcacacagtctcacacacattctctcacacacatacacactgtctctgtctcacacattctctctctcacacacacatgcactctctctctcacacacacactctctcacatacacacacacacacacacacacacacacacacacactaattgcttcaggacagccagctgaaggctgtgagcatccgggcgccctcagcacaggtgtgtggtggtaaaggcagcctcttgccagcagcagcacctgtaagtggtgcacacaggtgcagaaaagtgcctgttccctggggctggtggttcagagccggttgcagccaatgagcagcagcaacatcactggctcagcgctccccaggaactatcgccacgtgggcgtggagctgggcgtggccttcttttttccgtgattgccagctggcccagagctggacctgctcttggtggtgaggtgtgaagctggtgagtattcctcctgtcttgctctctgcccttcccgcttttgttctccactgctgattagaacccgcgtattgagcttactaggtgcccccaccctctcccttctggctgctcaaagcccaggaccaaaggattccttgaaagaacaaagtccagttaccccattttgctgaaaagatcttcctctaaaacctcatatttacttggggtatttaggtaagtctctcgtccttttcagacattcggtctaaaatactgtacagagggctgggtgcagtggctcacgcctataatcccagcactttgggaggccgaggcaggtggatcatctgaggtcaggagttcaagaccagcctggccaacatggtgaaatcctcatctctaataaaagtacaaaaatgagctgggcgtggtggcatgtgcctataatcccaccttctagggaggctgagacgggagaatcgctttaacccaggaggcagaggttgcagtgagccaaggtcacgccactgcactccagcgtgggtgacagagtgagacttcgtctcaagtaaaaattaagtacagagtagggggtactgcaacttgaatgtcaggattagctaatgtctggtctgcatttggtaggagtccagagggtgttttggtgctaattgtgcaaatactatggttaaccgtaacttagttattgaaatgccatacaattctgacggtgttgtttgtcctgtttaccaagggaggaagctgagccccagataagttaaatggcttgcctggggtagaaagcagcaaatcattcaaagctgggtctgagacttcaagccctataatcttaactgctgctttctaatcattcaggacacctgggtagaaaggtgaggtgggaggggtacggtctgtagaaaaagcatagagacaaaatgcaagcttagggaagtcactcatcctcagaaaataacctcaaccagcagccttcctttacctccctccagctgtattcctgcctggactcgaataactagcttctccccaactcctcacccacccgacttcacgggaaaaagtgactgcctatcccagattaatccttaggccgtccagtcatctttctctggggcttgattgatcagttcccactctgacaactggcaaataccaggcgttatcatcctgtatgcattaacgtactttcccctgaaacagagcaacccagtcaacaccacagaacctcagctttgaaccctggagtgaggacggtgatgccctgtgtgtattaatatgctatgtaaggctgggcgtggtggctcacgcctgtaacccagcactatgggaggtcgaggtgggcagattacctgaggtcaggagttccagaccagcctggccaacatggtgaaaccccgcctctactaaaaaaaaaaatacaaaaaattaggcgtggtggtgggctcctgtaatcccagctgctcgggaggctgaggcaggagaatcacttgaatctaggaggcagagtttgcagtgagctgagatcacgccattgcactccagcctgggcgacagagcaagactctgtctcaagaagaaaaaaaaaatacatatacacataaatatatatatgtgtgtgtgtatatatatatatatatatatatatgctatataaagtttaaatgaaatgctttgagtcacctaagacaggatatagacaaagtcttcatcgtcttcttgcttcttctacctttatttattctcagctctgaatgtatgaacctgctcaatcacctcatcttaaaaataaaatcactgtccctagaccatactcgtttccttacccacccctgaggcttttgttggtttttacagccctggttcacgtcttggtcctccagcccctttaaaggattgtgtagagcggtaagggaaatgtttaattcaaattacgtgtatatagaagtgtttagatatgacagtccgaaattcgttctttctcaaataaccttccttcttaatttcattgcctaagttgagagtctttgtcttctgtgttttgctttcaatttccatgtatccaggtggtttatgttaactcagaagggggagaaaaacctagaaaatcttaattgttctgtggtcaggatgtaagcttttaaacatgtgctcagaaataagtatttttccatttaccaatagtcaatattgtccctaaatatttataggaatgtgtagaaaagcttattttcttgctatggttctattttgagcaatacagcacataaacttcaatgttctatcatcagtgttcacgtgtacctagttttttggtcttccatggatgggtaattgtaagaatacctcaattgttttgatgaaattcatttatgtctacttatcttctactaaaatgattttttaatgggaggtactttttagtatttggtgatttttggtgtgtatgtgttagacaaagtctccctcttttgcccaggctgtagtgcaatggctggatctctactcactgcaccctccgcctcccaggttcaagcaattctgcctcagcctcccgagtagctgggattacaggtgcccgccaccacgcccggctaattttcatatttttagtagagacggggtttccccatgttggccgggctggtctcgaactcctgacctcagatgatccacccacctcagcctcccaaagttctgggatgacaggcgtgagccactgcgcccggcctttttcagtattaatttgaaagagcagcaatatgagaaggtgtggcgggaagtgtgtccttccctgcccccgtagtgtctcttccctattttctgctcatcacccaaagacattctgcgcacgtgtatggcattaagagccttacagatggggcaactttctgtgctgattgttgtgcatttttaaggatgcagggcacgttggtgctcaaattaacccacctgtttttaatcgactcctaaatggtcttcagtcttgctgttttacacacggctgggtctaattgcatttaaaacggataaagattgttaaagtaccgtccaaaaagatggcacccatttacacttcactaatgtaggagcaccttttccttcacccatcacaaagcagcgtccagtcacacattgtggacattgtcagcctcacatgtcaaacgtagtacatcattttggctatttaccttatcagtaataacttttt[132 bp omitted]tgcaacctctgcctcccgggttcaagcgattctcctgcctcagcctcccgagtagctgggactacaggcacacgccacgatgcccggctaatttgtgtatttttagtagagatgcggtttcaccatgttgaccaggctagtctcgaactcctgacctcaggtgatccacctgcctcaggatcccaaagtgctgggattacaaaagtcatatgcagttttttaactcttcaaaatccttctaataggctgggcacagtggctcatgcctataatcccagcacttggggaggccgaggcaggtggatcatttgaggtcaggggtttgagaccagcctgactaacatggcgaaataccctgtctactaaaaatacaaaaattaggccgggcacggtg[167 bp omitted]gaggcaggagaatggcaggaacccgggaggcggagctggcagtgagccgagatggtgccactgcattccagcctgggcgacggagcaagactctgtctcaaaaagaaaaaaagctgggcatggttgagggtgtctgtaatcccagctactggggaggttgaggcaggagaatcacttgaacccaggagacggagattgcagtgaactgagatcatatcactgtactctagcctgggcaacaaaagcaaaactccatctcaaagaaaaaaaaaattccgctgagctgttgatcattatcatggattggaagagctgtttacgtaatgcattctttgtcatgtctcaaatttatttgcagcagttttttcagcgggactttaaagatttgtttgtttttctggagtgaggagggtactgtattgaattaatctgtcatcttgtctcttttataccattcgattgagaccttctattccatttgctcattatttgggggctaaatgtaaagtaggaattcatgaacataaatatttcaaaatttagcccccggaaatggtgaccttctatcgtagatgttaaagtgcagcctagacatcaacagagtgaatatcattcttcttagaattttcttgtctagttttggcttttcatagaaacattgagtttcttgtcctgataacaatatcagcagtacttcttggatgatattatactgatggaggatgactgatgtgttgggaatctgcctctgcctcaccacattgagccttttatctagcagccgcattttaaagctctcaaaacagatagccacttttctaaattatgcatgttttacctctatagttgctgttcatttgatctcacgtttaactggttattagattttgtgtgggatttcatcgttacatttgttaccagcccaatttaataactacatataatttaaaattgagtaatttattaggcatacatacctacatacagatgttaattttcacctttttccacttttatacctcctctttatctgattgctttcctatcaaatataaattaggtaaatataaataatagtggaatatcagatataaagaatagggagagagtacaaaactgaacggaagtgctgacagctaacattctttttttactttttagttttgggggtacatgtgaaggtttgttacgtaggtaaacttgtgtcatgggggtttgttatacatactatttcctcacccaggttattaagcccagtacccagtcgttatttctttctgcttctcaccctcctcccaccctccaccctcaggtagaccccagtatctgtggttcccctctttgtgtccatgtgttcttatttagctcccatttataagtgagaacatgtggtagttggttttctgttcctgtcttagtttgcttaggatgatggcccccagttccatccatgttcccacaaaagacatgatctcattcttttttatggctgcatagtattccatggtgtacgtgtaccacattttctttatccagtctgtccttgatgggcatttaggttgactccatgtcttttctattgtaaacagtgccacggtgaacatttgcatgcatgtatctttatgggagaatgctttatattcctcttagtgtatatacccagtgatgggatggctgggtccaacgctactgcttttagctctttgaggaatctccaccctgctttccacaatagctgaactgatttacactcccaccaacagtgtataagctttccattttttcctgcaacctcagcagcgtcggttttttgactttttaataatgacacgtaacattcttatgggattctctgtagggcttgtgtcaaatccagcccattgcccagttttgtaaataaagatttattggaacacagcttttctcctttgttgacaaattgtctacagctactttcccagtgcaggagcagctaagcacgggtggcagagagcaaatggccccaaagccaaaaatgcctggctccttctgggagatttgctgacccctgatctttgtcaaaaatagatacatttgctgcagtttttcctttattttagttgacacataactgtacatatttatggagactttttttttttgaaatgaattttcgctcttgttgcccaggctggagtgcaatggtgcaatcttggctcactgcaacctctgcctcccaggttcaagcgattctcctgcctcagcctcttgagtagctgggattacgggcacctgccaccatgcctggctaattttgtatttttagtagagatggggtttct[131 bp omitted]gtatcatgatcaaatcaggggacttagcatattcatcaccccaaacatttgtgttgtgaacactctgtcctcccttctagctttttgagagtggacaataagttatagttcaccatattcacctgcagtgctgcagaacacctgcacccatttctcccttctacctgtaatcttagcacccatgagccatactctccccctcctctccccctcctctccccctcctctccccctcctctccccctcctctccccctcctctccccctcctctcccccctctctcccccctctctcccccctccctccccctctcccccctcccctcctctcccccctcccctcccccctcccctccccccctcccctccccctccccctccccctccccctcctctcccctcctctcctcccccctcctcctctcaacctcccctctcccctctccctcctctcccctatcctctaatacccacaattacatcccctacttccatagtcccatttgctcaatttaactcccacatatgagtaaaatacattcagtatttagtttcccatgcctggtttattttgcttcacacaatgaactacaggctgtagctcacatgaagagctacaggctcatctgtgttgtcacaaatggcaggattttttgaaggctgaaacatgttcccttgtgtgtgtataccacgttttcttgattcatttgttgatggacagttaggtagattacatatcttagctatcgtgaatagtggggtggtaaacatgagagtgcagacatacctttgatatacttcgggtaaatcaccagatcgctggatcatagggtattaatctattttcagttctttgagacactgctacactgttttccataatggctgtgctaatttacatttccactgacagtggaaaggagtttctttctctgcatccttgccagcatttatttttcgtcttttttgatagtagccattccaactagagggaaatgcaaatcaaaaccacagtgagattgcgatgatgagtaatgttgaatcttttttcgtatctgttggtcatttggatgtcttttgagaaatgtctgttcaggtttttacccacttcttaaatggattacttggagttttgctatacagttgtttgagttcctcatatattctgggtattagttccttgccagatcattattttgcaaatattttctcccattctgcggggtttttttgggaggggggacagagtcttgttctgtcaccaggctggagtgcagtggcaccatctcagctcactgtaacctccaactccctagttcaagcgattctcctgcctcagcctccccagtagctgggatttcaggcacgtgccaccacacccagctaatttttgtatttctagtagagatggagtttcaccatgttggccaggatggtctcgatctcctgacctcatgatccacctgccttggcctcccaaagtgctggagttacaggcctgagccactgtgcccagccaggttgtctctttactcttggactatttcctttgctgtacagaagctctttagttggatgtactcctattggtctatttttgcttttgttgcctgtccttttgaagtcttagccgcaaaatatttgccttgacttgtattcagaagagctttccctatgttttcttctggtagttttattatttcaagtcttatgtttaagtactttatcttgagttgatttttatatatggtgagagacaggggtctagtttaattctgcatatggttatcccgttttcgcagtaccacctagtgaacacagtgtactttccctaatcttggtgcctttgaaaatgagttggatgagttcatgctctttgtagggacatggatgaagctggaaactatcattctgagcaaactatcgcaaggacagaaaaccaaacaccacatgttctcactcataggtgggaattgaacaatgagaacacttggacacagggtggggaacatcacacactggggcctgtcctagggtgtggggctgggggagggatagcattaggagaaatacctaatgcaaacgatgagttcatgggtgcagcaaaccaacatggcacatgtatacctgtgtaacaaacctgcacgttgtgcacatgtaccctagaacttaaagtattaaaaaaacttaaatattaaaatattctaacaagtcctgaaaaatacattaaaaaagaaagagttggctataaatatatggatttctgaattatctattctgttggtctatgtctgttttcatgacagtgccatgctgttttggttactatagctttgtgaagtcaggtaatatgcctccagctttctttttgctcaaaattgtttgggctacttgggatcttttgtggttctatacaaatattaggattgtttttctatttctgtgaagaatgtcgttggtgttttgatagggattgcattgaatctgtagattgttttgggtaggatggccattttaacaacattcttctaatcagtgaacgttagatgtctccatttttatctatcctcttcaatttttttcagtattctgtgggttttactatagatatttcttacctccttagttaaatttatttctaggtacatttttgtagctattataaaggacattgctttctttttcagctagttcattattggtgtttagaaatgctactgtttttatgttgatttttgcatcatactgagttcatttattatataaaaacttgcatcatactgaaaaatttatccaaaaatcaacatttttgtatgttgattctgcaactttactgaattcctttatcagttctctgtcttttggtggggtctgtaggcttttctaaatgaaagattatattgcctgcaaacatgaacaatctacttcttctccaattttgatgccctttgtttctttttcttccctaattgctctggctaagacttccagtactgtgttaaataggagtggcggaagtgggcaccctgtgtgccagttcttagggaaaaggctttcttcttttccacattcagtataatgctagctgtgggtttgtcatacatggcctttattgttctgagttatgtttcttctgcgtcttatcataaagggatgttgaatttttttttctttgttcatcttttcttttatactttaagttctagggtacatgtgcacaacgtgcaggtttgttacatatgtatacatgtgccctgttggtgtgctgcacccattaactcatcatttacattaggtatatctcctaatgctccctcccccacaacagtccccggtgtgtgacgttccccttcctgtgttcaagtgttctcattgttcagttcccacctatgagtgagaacatgtggtgtttggtttttcgtccttgcgatagtttgctcagaatgatgatttccagcttcatccatgtccctacaaggacatgaaatcatccttgtttatggctgcatagtattccatggtgtatatgtaccacattttcttaatccagtctatcactgatggacatttgggttggttccaagtctttgctattgtgaatagtgccacaataaacatacgtgtgcatgtgtctttatagcaacatgatttataatcctttaggtatatacccagtaatgagatggctggatcaaatggtatttctagttctagatccctgaggaatcgccacactgacttccacaatggttgaactagtttacagtcccaccaacagcgtaaaagtgtttctatttctccacatcctctctagcacctgttgtttcctgactttttaatgatcaccattctaactggtgtgggatggtatctcattgtggttttgatttgcatttctctgatggccagtgatgatgagcattttttcttgtatctgttggctatataaatatcttcttttgagaagtgtctgttcatatcctttgcccactttttgatggggttgtttgttttttttcttgtaaatgttgattttatcaaatgctttttctgcatgtcttgatgatcgtgtggtttttgtccttcagtctgctgatgaaccacccttgcaaccctgagatgaatcccacttcatcatggggaatgatctttttgatgtgttcttagatttggttacctagaattttgtcaaagatttttgtatctatgttcatgagagacgttggcctgtagttttcttttttgtgtgtccttttctggttttggtatcaggacaatgcttggctcatagaatgaggaagaattccctccccttcaattctcggaatagtttgagaagaattggtataagttctgtaaaagtttaaaaggtagctgggcatggtggctcatacctgtaatcccagcactctgggaagccaaggtggacagattacttgaggacaggagttagagaccagcctagccaacatggtaaaaccccatctctaccaaaaataccaaaataccaaaaattctggttaaaataccaaaaaaatagctgggtgtggtggctggcacctgtaatttcagctacttgggaggttgaggcaggaggatcacttgaccccagaaggcagcagttgcagtgagctgagattgcaccactgcagtccagcctgggtgacagagcaacactctatctcaaaaaaaaaaattaatttgaaggatatctagtcctggtttgtaaagtgtttctgttgatactatttatacatccattgaagctatatatttttttattctctgaatgttgaaggtagggagcaggaagtactatctactcttataaatggttttatcataatcaaaataatcaaaacaaccatggtagcatacacacacacagaaaacatcttttcctggagggtaggtaggttaatgaaaaccttgcctcttttaatgaaattaagtaggaattccaaagattggattagatttatcttatctcagtcctgaatttcagacattctaaaattataaaaatataagaaaccaggtgtggggtgtgcacctgtagtcccagctacttggggagtctgaggcaggaagatcacttgagcccaggagttcaaggctatatggtgagctatgatagtcaccacactccagcct[149 bp omitted]gtctctactaaaaatacagaaaattagccgggcatggtgacaggtgcctgaaatcccagctactctggaggctgagacaggagaattgcttgaacccgggaggtggaggttgcagtgagttgagattgtgccactgtactccagcccgggcgacaatgcaagccttcgtctcaaaatatgtgtgtgtgtgtgtatatatatatatatatatatatatatatatgtgtgtgtgtgtatatatatatatatgtgtatatatatatacacacactttagcctcacctgcagattcacaaattgaagcaatcctaaatccacttttatttttaattgacaataattgtatatatttgcgaggtacaatgcgatgtttagatatatgtatacatggcagaaaaaagctaacatgtccattgccttagttactttttgtggtgaggatgtttaaaatctacttttagcaattttggagcatatattaatacatcttttcttaaattccatggcaggttaaatacatcattattaactctagttgccatgctgtgcaggggatccctaaaactcatttctctgactgaaacttgtttgtaccttttcatcaatatttcctttttccccattttatcccccagtctctggcaaccaccattcttctctctgctgctatgaatttaattgttttagaatccacacaattgagatcctactaaatctttttttttctttttcttttttttttttttttttggagacagagttttgctcttgttgcccaagctggagtgcaatgccacaatcttggctcactgcaacctctgcctcccaggttcaagtgattcttctgcctcagcctcccgagtagctggggttacaggtgcgcgccaccatgcctggctaattttttgtatttttagtagaaatggggtttcaccatgttagccaggctggtctcgaccccctgacctcaggtgatctgcccgcctcggcagtagcgtcgtaagcctgagcgcttgtgtaccgtgacatactcttctgctcaggacgtctcggtctggcaggtagctttagagcaggtggtgttcagggttcccatgcatgctctgtgccagcccttccgaccggctcacttgttgcttcactgaaacctcacagtaacccttgaagaggcaggtactctgatttccagcttccagaggagagcccagccttcgatgttcagttactttccatggcgatgttatcatgaaggttgcaggaggacttgaacttggagctgctgctctgctctcagcatcaccacgtgcgtcgacagcctcttagagttacctatgaggaaaccgaccctcagccttggtaccatgacacacggatcgaatcccctgccctcgctgctgtctgctgcaatgttattagcaatccgttgcagcagaacactccccggggtagaaagaaagtgaaagaatgcaggaaaaagcctattacttctccagggaggtggtcaacccatgacagttgtccagggactgccacctccccactcttttcaatgacagttgtccagggactgccacctctccactcttttcaatgacagttgtccagggactgccacctctccactcttttcaatgacagttgtccagggacggccacctctccactcttctcaatgacagttgcccaggcatggccacctctccgctcttctcaatgacagttgtccgaggactgccacctctccactcttttcaatgacaattgtccagggactgctacctcgccactcttttcagaggcccttcctgtatagaggatattcatgataacatgtttcctgtgtcccaggggaaaacgtgtacccacatatatcacctcatgtttttttttgtttgtttttttaagacagagtctcattctgtcacccaggctggagtgcagtggcacgatcttgactcactgcaagctccgactcccgggttcacaccattctcctgcctcagcctccctagtagctgggactacaggcgcccgccac[131 bp omitted]cactgcgctcagccacctcatcttgtaaagcatattaaattactaaatcagaacagggttagaaatattcaaacttggtcgggtgtggtggctcacgcctataatctcagcactttgggaggccgaggctggtggatcatgaggtcaagagatagagaccatcctggccaacatggtgaaaccctgtctctactaaaaacacaaaaattagccaggcctggtggtgcacgcctgtaatcccagctacttgggaggctgaggcaggagaatcgattgaacccaggaagcagaggtttgcagcaagtagagatcatgccactacactccagcctgggtgacagagtgagactctatcaaaaagaaaaaaagaagaagaaaatattcaaatttggctgggcgcagtagctcatgcctgtaatcccaacactttgggaggccaggggtaagaggattacttgagcccaggagtttgaaaccagcctgggcaacatagtgacaccttgtctctactttttttttttttttaaaggcctggtgcagtgatgcaagcctgtggtcgcagctactaggaaggctgaggtgggaagcttgcttcagcccaggagttcgaggctgcagtgagctgtgactgcaccactgcactccagcctgggcaacagcaagactcagtcatttaaaaaaaaaaacaaacaaaaaacaccacagcttattgaatagattttagctaccatgacatttctaggctcttgtctcccacctctaccctcctttaaatattttcttctgactctcctaattacttgaaattttataatttatcttctgactctcctaattacttgaagtaatctcagcaagcccatcttaaaactttcccatggaaagaatggtaggcagaaggaaagacgggggctaaatactggggacaactttgtccctgcaggtcaagggagtataaagcaggtgccctgtctaagcaagcagagccaaaaatccgtgttaacagaaaccctacaggctgatttttactttggtgggatgcttccagttccagggaggtgacatgacaagactttactgtgtatctgcaagtttagctcaaaaactataaatgtacagatgtcaagcaagggtgatctcacaccaataccgcccctcagacaatgacaagctgctgtctacctgagtctttaaaatgttttattacatggtattccttcgattgctttgtcatctaccacaaagtaatggtggggggaaaggagatttgctcaaactggccaaccagtactggctgtcactatttatagggctcttataatgacaagaaaaaaggaaatttgagagatttaggaattattcctggggccttataacaactgctacatttcaatgtcatcatagaccaggcttctagacaactcggggaggtaattgatagcagaggtcctggacgtgcacctataaaatgagttagcaggtagggatagaattggtcctgatggtgatttacgacattaatcttttcatgtgctcattagccatttgcatagcttctttggagaaatggatattcagaccctttgcccatattaaattggatcgtctcccttttagtgtatgtatattatctagatataaatcccttatcagatatgacttttaagtattcagcagtttatttttacaccaaaactgtttactgtgtttatggaacctgatgttaacaggtgtaacagaaatcaactgatctaagaaccctgtaactggttattagtaactggtaggaatctatttgccagaggtttttttttttaattttattattattatactttaagttttagggtacatatgcacaacgtgcaggtttgttacatatgtatacacgtgccatgttggtgtgctgcacccattaactcatcatttagcattaggtatatctcctaatgctatcgctcccccctcccccaaccccacaacagtccctggtgtgtgatgttccccttcctgtgtccaagtgtactcattgttcaattcccacctatgagtgagaacatgcagtgtttggctttttgtccttgcgatagtttgctgagaatgatggtttccagtttcatccatgtccctacaaaggacatgaactcatccttttttatggctgcatagtattccatggtgtatatgtgccacattttcttaatccagtctattgctgttggacatttaggttggttccaagtctttgctattgtgaatagtgccgctataaactagaatggcgatcattaaaaagtcaggaaacaacaggtgctggagaggatgtggagaaataggaacacttttacactgttggtgggaccgtaaactagttcagccattgtggaagtcagtgtggcaattcctcagggatctagaactagaaataccatttgacccagccatcccattactgggtatataccctaaggattataaatcatgctgctataaagacacatgccagtggttttttgttttttgagatggagtttcactcttgtccaggctggagtgcaatgatgcagtcttggctcactgcaaccttcgccttccagattcaagcgattctcctgcctcagcctcctgagtagctgggattacaggcatgtgccaccactcctggctaatttttttatatttttaatagagatggagtttcaccatgtt[134 bp omitted]atctgtggcatgcacgtccaattttattctaagatgctgtttgggaactaagggtacagacaacaaaatgtcccagcactgatgtctagtaataggataaacagatattgtggcaacaaatgcttcgtccatgaagaattgaaaagagaaggccgttcatctagtgaggtgattgatgttagttgtatctacttgagaatttgctgcaagatcctcttttaagtcttgtcactctttccacaggtcctacttgctctatattaccaaagaatccacttttcccccaaaacctgagctctcagccttgtatcaagatggaaggagacaaatcgctcaccttttccagctacgggctgcaatggtgtctctatgagctagacaaggaagaatttcagacattcaaggaattactaaagaagaaatcttcagaatcgaccacatgctctattccacagtttgaaatcgagaatgccaacgtggaatgtctggcactcctcttgcatgagtattatggagcatcgctggcctgggctacgtccattagcatctttgaaaacatgaacctgcgaaccctctcggagaaggcacgggatgacatgaaaagtaagcgagacttgggacaagtctagggcagggaggggaggtgatttcaggttctcatgggaacagggaagaatcgttgttcagtaaccggctccacctctgcagtgtgagtctgagctgtgagaaggatcctattggtcatcgtcattggttggaaattagtgtagtctctagcctgtaaaataatggaggagggagaaatgggtagacaacggctccacccacatggacttcattgaagttaataggatttgggttgtaagtgctaagcttgagctctggcgctatcacgggtcggttgtgagacttcgggcatgtctccttctgttctgacccttggatcccacatcttggaacaggaaatgtgttactgtgtgtgccattgcaaaagttcaataatgtgtaatgcataggaagtggctaagaacctcattggttgataacattggtagtggtttggtgcgagtctcgtgcttggccgtgggatgaaggactgaggttccaggtgctcatctgaggcttggactttcttgggctattggtgtccgtagtgcagcaagaattcggatcagattctatgattattttagggtacttaggagaaaggtcatttagaaaatagcagttcttttttatctagagaatctctccaactgtagactgaaaacaaatcccttgactgagcccttgaattggccctacaaatacaggtgtgggctggatgcagtgactcatggctgtgatcccagcactttgggaggctgaggtgggtggatcacctgaggtcaagagatcgagaccagcctggccaacatggagaaaccccgtctctactagaaatacaaaaaattagccaggcgtcatggcacatgcctgtaatcccagctactcaggagactgaggcaggagaatcacttgaatccgggaggcagaggttgcagtgagccgagattatgccactgcactccagcctgggcaacggagtgagactgtgtctcaaaaaaaaaaaaaaatatatatatatatatataatatatacacacacacatatatacacacacatatacacatatatttttatatatacacacatatttttatatacacatacacatacacacatatacacatatatttttatatatacacacatatatatttatatatacacatacacatatacacatatatttttatatatacacatatatatttatatatacacacatatttatatatacacatacacatacacatatatttttatatacacacatatatatttatatatacatatacacacacatatacacatatatttttatatatacacatatttatatatacacatatatttttatatacacacacacatatttatacacacacacacgcaggtggcatgcctgtacacatatatatttatacacacacacgcacacacgcaggtggcatgcctgtacacacatatatatttatacacacacgcacacacgcaggtggcatgcctgtacacacatatatatttatacacacacacacacacacgcgcgcaggtggcatgcctgcacatccgtgacctggatgcagctcagcagcattagctgcaaaacgcttcaagggctctctctcctgagcttggaaaaaaggcccagtgtggagggcatgtgggtattattcccaggaagagagtgcataaaaatgagagctagggtttatcaagtcagcactgcactgaaactgtcatgtccccaccatctgactctcaaccccacccagtgaaatgggttccctatggctgaagctgtgatagaggatcttacaagatacataacttgaccaacttcatgggctaataagtggcaaagatgagattgattgtttaacattcatctaccgtggcatatgtttaaattctcatatgtctggtgtcagagatttgcagttttccatgaggtagagagaaagaaatgggcaactttaaaaatgaatgatagccataaaaaaggatgagttcatgtcctttatagggacatggatgaagatggaaaccatcattctcagcaaactatcacaaggacagaaaaccaaacaccgcatgttgtcactcataggtgggaattgaacaatgaaaacgcttggacacaggaaggggaacatcacacaccggggtctgttgtggggtgggggaagtggggagtgatagcattaggagatatacctaatgtaaataacgagttaatgggtgcagcacaccaacatagcacatgtatacatatgtaacaaacctgcacattgtgcacatgtaccctagaacttaaagtataattttaaaaaaaaaatggatggtataggccaggtgggtgtggctaatgcctgtaatcccagcactctgggaggccaaggtgggtggatcatttgaggtcaggagtttgagaccagcctggccaacatggtgaaacactgtctctactaaaaatacaaaaattagccaggcatggtggcacacacctgtaatcccagctacttgggaggctgaggcaggagaatcacttgaacccgggaggtagaggttgcagtgagtcaagatcgcgccactgcactccagcctgggtgacagagcga[132 bp omitted]cttcagcctcctgagtagctgagactacaggtgcccgccagcactcctggctaattttttgtatttttagtagagaaggggtttcaccttgttagccaggatggtctcgatctcccgaccttgtgatccacccaccttggcctcccaaagttctgggattacaggtgtgagccactgtgcctggcctaaaataaaattttttaaaaattgtatataaaaatgtcttatggctgggcaccgtggctcacgcctgtaatcccaatactttgagagtcctaggcgggcggatcacttgaggtcaggagttcaagactagcctgtctaacacggtaaaaccctgtctctactaaaaatacaaaaaattagcctggtgtagtggcaggcacctgtaatcccagctactaggtaggctgaggcaggagaatcgcttgaagctgggaggcagaggttgcagtgagctgagattgtgccgttgcactccagcctgggcgacagattgagactgtcttttttttttttatagaaagtcttacagttcctattccagatgagagggaagtttagaatcacttcctagaaggagtaagctttaggctgagataaacaaagaagaggagttggcggagttgcctgagcatggtagagaaaaacattctgagcataaagtcagggcatcccaaagcctttaacagagggtttggctgggccacggagaatgagcaggaggtgaagacggagggactagaagtcagataacatggcatcttgaaaatacttgtaatagcaagtagaagcaattacatagtttgaaaggggtggtaatagaaatcatcaaactttcctttcagcactgttgcaaaagtgttgagtgacccagaggggattgtggaataaacacagggagacgagtttgaggtctttctactgtccatgagataaataaaggtggcttggaataggatgatggcacagaaagaagtagaaatggaagatgcttccaaagtgtacaagacagtttgtgtgtgtgtgtgtgtgtgcgcgtgcgcgcgtgcgtgtgtgtgtgtgtgtgtgtgtgtgtgtgtttgaaacagagtcttgctctgtcgcccaggctgggctgtcgcccagtgcagtggcgcgatctcggctcactgcaaactccgcctcccgggttcgtgccattctcctgcctc[224 bp omitted]agtgtcatgggtgatccccaagtttctggcatgataaactgggtggatggggttccatggcctcaccccatggaagagatgttttgcaaaaagtagattgggggatgggtagtcaatcttggaccttgtaagttgttgaaggtacctgtatttgggtaactcataggcatctagtgagtcattgactaactgggtctggagttcaagacaggtcttgaggaggactcctgaaaagaaacttaatcaccacaattaacctcattgtgtgacttacccaaggccatccagcaaaacggccagagaattcttcacaaacctctgtttcttcagtgtgcttctgctggctcaggaaagtctgactttgttgtctccgttataggccaatcatggaataaactgagatcctgaggtttgtcttggttcccctccataatttggacacgggacattcttatccttggcttgggtaattacagtgacttcattgaggccagtctccctttttctttgtcttccaggacattcaccagaagatcctgaagcaacgatgactgaccaaggaccaagcaaggaaaaagtgccaggttagaggggtggagttgggggaaataggatgtgcttaaagacacatggcagccagtttgcatctctaggcattagaaccatgacttctgatagtctagtgttctttctagtctaactaccctacattagctgaccggatgggttctgaggatctggtaattctggtatttctctttccaagttgaagagttctgtggcctggggccaggtctagtggctcatgcctgtaatcccagtactttgggaggctgaggtgggcagatcacctgaggtcaggagttcaagaccagcctggccaacatggtgaaacgtcgtctctactaaaaatacaaaaaaatagccagacgtggtggtgggtgcctgtaatcccagctacttgggaggtggaggcaggagaatcacttggacccggtaggcagaggttgcagtgagccgagatcacaccactgcactccagcctgggcgacagaacgagactccatctcaaaaaaaaaaaaaaaaaaaagagttctgtggtcttcaggctttcttacaacttgaggacttcccatcgtcttcagtttgggtaaccttatgaccccactatgacaagctcctcccaataacccagtaggaggctttggtggaaagaatcagatagcatgaaaccagattcaatacaattccccaaacattagagcactgacctcatgccagccactgctctgcgtatttacaatacatcgttggccaaagcatacgtgttcatgaaattcacacattgtgggacaggaaagacaaaccaaaaaactaagatgacacaagggaaggcaaaacacacagggagaaaggcaggctgcatagacaccatgaattctcctctgctacctgcgccgctaccatcttgctcagctcccagcagccagtgttgaccgtgaaacctaatctggtttggaaggggttgaagccaacctcgttttgatggagctttgctcaggctgtgggtggggaaagagctcttcaaagctaacatctgagtaactggcatctgaatcagaggctctgaatcccaaaggttctactttgctcagagtttgatgtcaatctaggcttcaccgggtgagtgtgacatgttatccttcatgtgataagactgcgtctcagaggttttataagttaccaaatggtggcttagagcgtaaaataaacacacagagtaaccttgatagtaggactgaaacaaacctgacaaaagccgggggtcttgccatcagccacgttaggagatccctctgagctgctcctggacacgagaactaccacttcttgagaccacttggatcacgcaccgtgccagtgctttagtccatgcttctcaatcctctgtggtactggctgtcgttagtcatgcagcgagacccagaagctcaatgcacaccaaagtctcacatggttaaattgaggcaaggtgggcttgtgccagaaagacctgactgcaggtgttatccacgtacaaagatgaaggccatcagagacagacactctaccctcaaggagcttacatcataggggatcacaggccttcgt[144 bp omitted]agacaccccatgtctactaaaaatacaggaaaaaaaaaactagccaggcgtggtggcatgtgcccgtaatcctagctactcaagaggctgaggcaggagaatcacttgaacccaggaggtagaggttgtggtgagccactgcactccagcctgggaaacaagagcttaactctgtctcaaaaaaaaaaaaagtcccttgaaactaagccaacccaataaatgcagttttttttttatcaagctatagaatcaaatgtggtccatgtatacaatagtatattatttggcataaaaaggaatgatgtggctggacacagtgactcatacctgtaatcccagcactttgggaggctgaggcaggcagattgctcgaacccaggagttcgagaccaacctgggcaatgtagcaagacccgacgtctaccaaaagaattaaaattagctgagtgtgggagtgtgcacgtatagtcccagctacttgggaagctgaggcaggaggattgcttgagtccaggggggttgaggctgcattgagccatgattgtgtcactgcacttcagcctgggtgataaaatgagactatgtctttaaaaaatatatatacacacatacattaatgtatgctacaagatggatggaccttgaagacactaggctaagtgaaggaaaccatcacaaaaagatatatattgaatgattccattcatataaaatgtctagaatcggcaaatccatttaaatactagattagtggttgcctagggctggggtgaatggggaaacttagagggtgaggactaagagggcagggtttttctcgttgagggtgattaagatgttctaaaattgtactgatggttacaatgtgaatattctcaatcatgattgcacactttcaatgggtgaattgtatgatttgtgaaatttatttctgtaaatctattacaaaactctagagaagacaataagatacatccatccgaagtcagcatcgtacgtatgacgactacaaagcccagagagacagatttgcccaaagaagatcagccaacagaaagcctgattttttttttctttccagactgagatgtcatctttgtgttagatcttttttcttttcctatgtcttttttttttttctttcccgcctagatagtctcgctctgtcacccaggctggagtgcaatggcttgatcttggctcactgcaacctctgcctcccaggttcaagcgattctcctgtctgcctcccaagtagctgggattacacacgcgcgccaccgtgcctggctaatttttgtgtatttggtaaagatggagtttcaccgtattggtcaggctggcctagaattcctgacctcaggtgatccacccacctcagcctcccaaactgctaggattacaggcatgagccaccgcacccagcctagatcttataaattctatgtaagttcagattctttcatctcttacatggtgaatctatttagtctaatagattgaatgtattatgatgctcaagacatagctcctaatataaatccacccccacaag[139 bp omitted]ctgcctcagcctcccaagtagctgggactataggcacctgccaccatgtccggctaattttttgtatttttagtagagatggggtttcaccatgttggccaggctgccttcgaactcctgacctcgtgatccacctgccttggcctcccaaagtgctgagattacaggcatgagccactgcgccttggcctttttttttttttttttccggataactcgatgcaggtttacatatcgtaaaatcttgagaatacaattcgaaaatttataaacatgaacctattaccataatccagtcttaggacatttccataacccaaaaaaaaaaaaaaatccttcagcagagacaacaagatggagaaaattggcctgtcttacttttgcataatttggaacgatcttacaattattttccttggaacgatcttacaattattttcccagaacctgatattgtaatgaatgacacttacagacttctttcaagtgttaaactgctgttgctttcctggaatacctgtgatataagcaccattacatacctttgatacacttctgatacagtttgctgataagtcacttcaaatttggcgtctgtgtttgagtgaactggtctgtaatctctttatatactttccttgcttttttaaagttgagagaaaattcatatatcataaaattcatcttaatacaattcagtgttttattgtattaacaaagttgtgtaaccatcactgctacctaatttcaggaaattttcatcaccccagaaaaccacatacctattagccatcactccccatacccagcccctggaaaccagtcatccactttgtgtctgtgaattttgccttttctggactttgcatataaatgaaatcagacactttgttatattgtgtgactggctttcttcatttaacataatgtttttgttttttgtttttgttttgagatggagtcgtgctctgttgctgaggctggagtgcagtggtgcgatctcggctcactgcaacctccgcctccctggttcacgctattttcctgcctcagcctcctgagtagctgggactacaggtgcctaccactacacccagctaattttttgtattttcagtagagacggggtttcacagtgttagccaaaattgtctcgatatcctgaccttgtgatctgcccacctcagcctcccaaagtgctgggattttaacataatgttttaaagatttgtcaatatcatagcctgtctcaggacttcataactttttatggctgaacagtattccttttatatatataccgcttcttgttcatttatcacatgatggacatttgggtttttttttttttttttttttgctattatgaacgatgcagctatggattcccacgtgtgtgtttgtgtagatgtgtttttgattcagggaggcctatacctaggagtggaagtggtgggtcatatggcaactgtgtttaactttttgaggagctctgccaaatggtttttcttgagtgactgcaccattttgcatcctcaccaacaccttaatgaaagctacagtaacgtttgctccactatttttcattgtaaccatcctagtagttatgaaacattgactgtggttttgatttgaatttccctaattatgttcagaatcttttcgtgtgcttattggctacttctgtgtctttagagaaatgtatattcaaatccttggtccttttttaacttcattatattgttgacttgcaatacttaggttttatcatctagattatgtagagacataattttatatattcccctgttctctgagttgtcttttcacattgctgatactgtcctttgaagcacagcgggcttttattttacaagacaaatttatttccttgattgtttgtgcttttggtgttatatctttaaaaaaattgtttaacccagctgggtacggtggcttacacctgtaatcccagcactttgggaggccaaggcggtggatcacaagatcaggatatccagaccctcctggccaacatggtgaaaccctgtctctactaaaatacaaaaaaatccaccaggcatggtggcgctttcctgtagtcccagctccttgagagagtgaggcaggggaatcgcttgaacccaggaggtggaggttccagtgaaccaagatcgtgccattgcactccagcctggtgacagagaaacgctccatctcaaaaaaaaaaaaaaaaaattgcttaacccaaaatcagaaggtttacaccaatatttcctcttaaggattttgtagttacagctcttaaaaacatttaggtctttaaacattttgagttaattttgtatatagcatgaagtagagggttcaacttcatccttttgtgtgtagataaccagttctccagcaatatttattgaaaacactattctttatcattgtctagatattcttgtctaaaatcacagatgtatgggattatttttaaactttccaatctattccattgatctctatatctgaccttgtgcctgaaccacactgacttaactactattgctttatagttttgaactcaaagtgtgattctccaacttgacttcaagatagattggctattctgggtctgttgaatttccatgtgacttttagtatcaatcagctttacaatttctgcaagcaaaaaaaggtagctgggattttgatgagattgcattatgtcatgtagattaatgttgggtatatgacacagtaacaacattaagtcttcaacccatggacacaaggtggtctttccattaatttagggttttcttaattttttttggttacgtttgtggctttcaggatacaagtctctcatttcatttgttaaatttgtcctgaaatattttgttctatgccattataagtggagtgtttgttttgttttcgttttgttttgtttgtttgtttgtttttgacagagtttcactcttgttgcccaggctggagtggtgtgatgtcggctcactgaaacctctgcctcctgggttcaggcaattctcctgcctcagccttccagtagatgggattacaggcacacgccaccatgcctggctaattttttgaatttttagtagagacggggtttcaccatgttggccaggctggtcttaaacccctgacctcaaaagattcgcctgcctcggcctcccaaagtgctggtattagaggagtgagccactgtgcctggcattgttcattttattttgtttactgccagtgtatagaaatacttttgattttgaatcgtcggatcttgaatctagtacttatgttactggcgcacactgccctggcgctgagccagtggttctgtgctctaaactggtcagaaaattaactatggcatgactaagtttatctggggtgtccaacatctctgatttgaataatatacacagtatgtttgtgtttattcttctcccttctcttttgcaggaatttcacaagctgtgcaacaagatagtgccacagctgcagagacaaaagaacaaggtgaatgaaatagatctattcatttgttgccctcctggaagaaagttgggtgagagaagttcatgtagttcaaaggacggggaaatccactttccctttcttcatcctcatttgtctctggtgtgtgagtccctcttccctaagagatcttgggatcagcaccatggacagaaccttgcacgttcactacgattattttcactacagttttttatttttaactgaaaaataagaattgtatatacttatggggcgtgaggtttcaatacacgcatatattgtagaatgatcaaatcagggtaactagtgtatccatcacctcaaatattctttgtgctgagaacattttatttttacttatttatttattttgagatggagttcttttcttgtggcccaggctggagtgcagtggtgtgatctcagctcactgccagctccgcctcccgggttcaagcgattattctgcctcagcctctcaagtagctggggctacaggcatgcaccaccacgcccagctaattttgtatttttagtagagacagggtttctgcatgttggtcaggctggtctggaactcccgacctcaggtgatccacccacctcagcctcccaaagtgctgggattacaagcttgagccaccacacccagctgtgctgagaacatttaaaatcctcttttagctattttgaaatagactttgttattaaccagtcaccacgttgtgcaatagaataccagaacttactcctcttgtctagctgtaagtttgtacctgttgactaatgttttccaactttcccggtccactctctgccccaccagcctctggtaaccactgttctaccctccaattctgagttcgacatttttagattccacgtgtcagatcctctggtatttctctgtgcctggcttacttcacttaacataatgtcctctaggttcctcaatgttgtagcaaatgacagaatttcctgtatgttttagagctgaataacccattgtgtatatacaccacatttttttaagggagtcttgctctgttgcccaggctggggtgcagtggcgcgatctcagctcactgcaagctccgcctcctgggttcaagtgattctcctgcctcagcctcccaagtagctgggattacaggcatgcgccaccatgcccagctaatttttgtatttttagtgcagatggg[134 bp omitted]tagttgtgaccctctttcattcccgactccagtaattttagctgtctctttttttccttggtcagtctggctaaaggtctgtcaattttgttcttttcaaagaacaaactggtaggtttgttttctctatggtatttccatcttgtattttgtttatttctttattccctttctctgcctgttttggggtgagtttgctactcactaaccccaaaagggggttctttcctactttaaggtgggaagttatattatatttcagatctttcttaggcatttatggctataaattttcctttatgcacggctctacctacacgctgtaaatattgctgtgttttgtttccactcatttcaaagtatttaattcccttttgtttcccctttgacctgttgaggatcgtgtggcttcacttccatatatttggaaattttcaaattttctgactgatttctaatcttatttcattgtgttaagagagcatactttgtataatttcaaggaacataaacttgaagcatgttttatgcctgatgtatctatcttgaagaaggtctgtttgcagttgagaagggcatgttttctgctgttgggtggagcgttggtttgatatctgccttcactgttttccatatcggtaaatagcgtcactatgtgcctggtcgtttacaccaaaagcttagtcgttttttgctcgtttgtttgtctcactctgtctcccaggatggagtgcggtcgcgcaatcttggctcactgcaacctccacgtcccaggtttaagcagttcttgtgccttgacttccttagtagctgtattttttaatatttattttctccaccatatatctagcaaatcagaagatcatatggtctctacccgtaatatatgacccatttttacacagttcttcccatcttctgtatttctgtggtgtatatacacaatgggttattgaaggcatttcatttgcgtcccaaacgcaatccacttttacatacaatcaatttttcatacaataaccaaggcgatctaaaaatttacgcctgtaacttgattcccatgcttaaaaatccttaagtggtttttattctgtttgtgattttaaaaaatctataatttttctctaattgacaagacaaagaccaccctaatgattgttctttaaaatggcaaatctattctcatatatcctaagacgaatttgtatttagcctcacatggtaactatttcctgataaatatatatagtggttattctcagtcagtggtagctactatatgccagaggctgtgttattactctaccaaatcatctccacagcaactcgacaacataagaacaatttctttgcttttctagatgagcatacagaaacatttaacttcagtaacttgatgaagatcttacaaatagtttatgacaactcacatttgaatcctgtgtctaattcaaatccaattctttttttaagagagagagttttgctgtattgctgagactacaatgcagtggctatccacaagcatgaccgtagctcactacagcctcaaactgctggactcaagtgattctcctgcctcagcctcccaagtagctgggactacaggcatgtaccacaaaatctggctctaagatcctaagatccttaattcttaactgtaggttttgcccctcatttaatttttgtattcttattattatttttggagtgcagtggcatgatctcagcttactgcaacctctgcctccaaagttcaagttactctcctgcttcagcctcctgagtagctgggattacaggcacgtgccaccatccctggctaactttttgtattttttagtagagatggggt[135 bp omitted]ctcttcaaggagaaatgagcctgggaccctcaccctcaagctttgaattagtgctcattgtaccagtgcactctgtcttctagctgagacagtggttgccatgttttcaactggccagaaaataaatatggcatgactaagcttatcttgggggtgtctgacatctctgactcaaataataaacacaagtatgttggaattcattcttcttttgcagaaatttcacaagctatggaacaagaaggtgccacagcagcagagacagaagaacaaggtgaggaaaatagatgtattccttggttgccctcctggaagaaagttgggtgaaagaagtgtaagtagtttagatttcaagggtatgtagtttagattgcctttcttcattctcatttgtctctggtgtcaaccccttcccttcaagctcttgatcagtaccatggatagagctacgcaagttcactgtgattatctacagtcagatactatgaagacaaaattctaaagaacccataattctaggggactcgaatcaatcacaactttgtttgatggatgttaaacatatggccaagagtagtcaaatgctgtcttcaaacttaagtggcagtaattatttttgtaattccttctatcaactaatatgtacatgaatacctgccattgaagaattgtgctggaattacagtggtaagaaaaacatgtcttgccttcatggcatttttttttttttgagaaggagtctcgctgtgtcgcccaagctgtagtgcagtggcgggatctcagctcagtgcaacctctgcctcccaggttcaagcgattcttctgtctcagcctcccgagtagctgggattacaggcacctgccactgtgcccgactaatttttgtatttttagtagagatgggg[132 bp omitted]tcttcaaggagaaatgagcctaggaccctcaccctcaagctttgaattagtgctcattgtaccagtgcactctgtcttctagttgagccggtggttgtcatgttttcaactggccagaaaataaatatggcatgactaagcttatcttgggggtgtctgacatctctgactcgaataataaacacaagtatgttggaattcattcttttgcagaaatttcacaagctatggaacaagaaggtgccacagcagcagagacagaagaacaaggtgaggaaaatagatgtattccttggttgccctcctggaagaaagttgggtgaaagaagtgtaagtagtttagatttcaagggtatgtagtttagattgcctttcttcaatctcatttgtctctggtgtcaaccccttcccttcaagctcttgatcagtaccatggatagagctacgcaagttcactgtgattatctacagtcagatactatgaagacaaaattctaaagaacccataattctaggggactcgaatcaatcacaactttgtttgatggatgttaaacatatggccaagagtagtcaaatgctgtcttcaaacttaagtggtagtaattatttttgtaattccttctatcaactaatatgtacatgaatacctgccattgaagaattgtgctggaattacagtggtaagaaaaacatgtcttgccttcgtggcatttttttttttttttttgagaaggagtctcgctgtgtcgcccaagctgtagtgcagtggcggtatctcggctcagtgcaacctctgcctcccaggttcaagcgattcttctgtctcagcctcccgagtagctgggattacaggcctgccaccatgcccgactaatttttgtatttttagtagagatggggtttcaccatattggccaggtcggtctcgcactcctgatctcgtgatctgcccaccttagcctcccaaagtgctgggattacaggcatttgccgctgtgcccagctgccttcatggcatttatcatccagacttacacattagctaaaccttatggaatgaagatgagtctaaagtgctataactttgcaggatgatgattaaacagccaaagatgtaagagcaggcttccctgagaaactgttgattgaggcttttttgttgagatataattaggattttatataccataaagttgaccctcctgaagtatatgattcaattatttttagtctattcagttatccaactgtcatcactaattccaagacattttttttctcccaaaaagaaaccccatacccctttgcagtcaccagtttcctctccctcaaaactctggacaaccactaatctactttgtatctctaaactctccgattccagatcggtcatgtagatggaatcatatgatatgtagttttctgtgactggccatgtttcacttggcataaagttccaaagcccgtgttccagtgtctatcagcacttcgtttttgttgctgaataatattccattgtatggaaagaccccattttcttcatctgttgttcagttcatgggaatttggcttttttctcactttggggctgttaacagtgttccctgaacactcatgtcctaggaggcagtgatggaaagaagtgacttgactagcatgagatattgaagatataaagctaactggaattggtgattggcagagttctgaaaaaaggggctctgggaattgctctcacctttcttctggaacgatctggtgggtggtgatgccaggagtcagtgactaacattttgagctctgagacagcttcaagctgggctattatcccacctgtgcaatgtaatgttgatcctgtgtgagctacataatcattcactcaaccaatatttgaaaaactaatggttgccagtgttgtcaactttaaattgggacgaataatatacacaaatatcggtgacatttttagaataattactctggtctaggcactgttctccacattttgattgtcaagacaccttcacgctaacctagtaaggggagatacactctccactccaccccttttttgaaacagggtcttgctgtgtcgcccaggctgaagtacagtggcacaatcacagctcactgcagcccctaactcctgggctgaagcaatcctcctgcctcagcctcctaagtagctggaaattaggcatatgctacaacatctggctaattttcatatttgttatagaaaggagggggcagggggtctcgctatgttgctcagtctggtcttgaactcctggcctcaagtgatctgcccatctcagcatcccaatgcactaggattacagggatgagccactacgcccagccaatccctactatataaatgaacaaattaccatataccggattgatgggaagccacaattaaatttatgtaaaacaaggaaaacaatgagctcatcatctgctccaaagtaggatcacaaacacaacctttttttcttgttatcacttagaaaaaacctatgagagaatattttttgttagaagtaaaagatgaggttttttgttttttgttttgagactgagtttagctcttgttgtccaggctggagtgcaatggcgcgatctcagctcactgcaacctccgcctcccaggttcaagcgatgctcctgcctcagcctcccgagtagctgggattacaggcatgtgccaccacacccggctaattttgtatttttagtagagagatggggtttg[142 bp omitted]ctgtgaccccttaaaggggcgagttagacacacaagtctggaattttaggaaagaagccctcacgaaggagaggatgggaaccctgaagtatagacgtgataattaaatccatagaaaaagaggtgtttgaggaagaactgagggaggcctgagtttgaatgcagactggcttcctggggtttccctccctctgtaaaaacctacattccagtggcactgccagtcctctgaggacaacaggtcggtctgagctcagcaaatagaggttctagtcttaaggtgtgcttcccgtggtttcaacacggctctgttaacacgtcccctgatgtggacgacagacggccctccgtttcccatgggttctgtgtccatggattcaactaaccatcgatcaaaaatattcaggaaaactccacaaagttccaaaaagcgaaatccgaatttgctacatgctgagcggtgcgttgagtccacacaaattgaagcgatgtgtagacatcgtgttagatattataagtagcctagagatgacttaacctacgtgggaagaatccacacaaatgaagcaatgtgtagacatcgtgttagatattataagcagcctagagatgacttaaactacatgggaggatgtgcgtaggttatatgcagttataccattttatatcagggacttgagtatctggagattttgatgtcatttggggatgtcctggaacccatcttggactgattcagaggatacaactacaatgaagtgtaagttctagaatttttatgtggagactttgcatacagttagtaattgtattacacatttgtgcagagagactcttgctgcctttttaaggtaaatagtagtaccagtaaacttaaggtcccaggatatgaatctttttcacgttcattgagtacctatcagatatcagaggctgaagaggctggaactattgaggcaaaaagacaaggtatttttctcatggagcttacattataagctagggggctgacaaaaactaaatgcataaaagagttgaagtttgtgataaatgtcaggtggtataaaataattatagtttgtgataagtttcattttttcacattttcaggccctgtgctaatgttgaatgcatattcttaaatctttatcaggtgggccgggcacagtggctcatgcctataacccgagcacttgggaggctgaagtgggcggatcacttgaggtcaggagttcaacaccagcctggccaacatggtgaaacctcatctctgcttaaaaaaaaaaaaaaaagaacaaatatatatatatgtgtatatataacatatatacatatatgtacatatatgtatatatgttatatatacacatatacatatatttatatatacgtacatacatatatacgtgtgtatacgtacatgcgtatatacatatgtatatgtatatgtgtatgtatatgtatacatatgtatatgtatgtatatgtgtatatatgtatatatacacatatatatacatacacacacacacacacacatgaaattagctgagcatggtggcaggcacctgtaatcccagctacttgagaggctgaggcaggagcattgcttgaacctgggagatggaggctgcagtgagccaagatcacgctgctgcactccagcctgggcaacagactgcaactgtgtctcaaaaaaaaaaaatcttcatcaggtggggaaactgaacagcagcttgtatcaaatcatacagatgctctacagcaggggtccccaacccccaggccatggacttgtagggtggcctcttaggaaccaggcagtatagcaggagggagcaaagcttcatctgtatttacagctgctccccatgactcatgttaccacctgagctctgcctcctgtcagatcggatgtggcatttggttcttccaggagcatgagccctattgtgaactgcacatgtgagggatctgggttgcgtgcttatgagaatctaatgcctgatgatctgtcagtgtctccatcacccccagatgggaccatctagttgtaggaaaacaagctcaggctcccactgatcctacattatggtgagttgtatgattatttcattatatattacaatgtaatcataataaagtgcacaataaacataatgtgcttgagtcatctcaaaaccacccccttccaccccggtgtgtggaaaaattgtcttccacaaaaccggtccctggtgccaaaaaggttggggatcactgctctaccgtagagcttgggttccaggcgggatctgtttgacctcaaggaacgtgctccgttctctctctctctctctctgtctctctgtttttttttgagatggagtctcgctctgtcgcccagtctggagtgcagtggcacaatcttggctcgctgcaagctccaccttctgcgttcatgactttctcctgcctcagcctcccgagtagctggcattacaggcgcccgccaacatgtctggctaactttttttttcgtatttttagtagagacggggtttcactgtgttagccaggatggtctcaatctcctgaccttgtgatccacatgcctcagcctcccaaagtgctgggattacaggggtgagccagcacatccggccattcccctctttatgtacagcaggattcccccattgcgtgggggaaaccaagggatggaacaggaggggcacacctgtcctacaggtgtagaacttggggccatggtacatgcatccgtggctccctcaagttcccctccccctccccaaggccacttatgttggcatacatcattcatttaacaaatacttgatttcccacagagtgccaggcactgtcataaatactgaaggtccaagagtgagtaagaaagtccatgtttagattctacggggggagaccatcagcaaatacagcgtaacccatcaggtccccagtgcaaaaagggacatcgggttgaacaagggaagcagagctattttgtagattgttaagaagcttttgaggcctttaaagtagggaacgaagagtgagcatgttctcagcacctggctaggaagaaacaagacccatgtctggaggctgactcaggccccactgatgctcggtccagggtttctgtgagg[132 bp omitted]aaaccccgtctctactaaaaatacagaaaattagctgggcgtggtggcaggcacctgtagtcccagctactcaggaggttgaggcaggagaatggggtgaacccaggaagcggacgttgcagtgagctgagattgcgccactgcactccagcctgggtgacagagcaagactccatctcaaaaaaaaaaaaaaaaaaaaaatagactggcttcaaattttgtttcccgatttatttttatttttattttgagatagagtctcgctctgtgaccaggctggagtgcagtggtgtaatctcagctcactgcaacttccatctcccgggttcaagcaattctcctgcctcagcctcctgagtagctggggactacaggtgccaactaccatgactagctaatttttgtatttattagagacggggctttgccattgaccaggctggtctcaaactcctgacctcaggtgatatgcccatcttgacctcccacagtgctgggatgacaggtgcgagccactgtgcctggtctgtttcctgattttcattctaccctctctgactccaggacatggaggtgacacatgggactacaagagtcacgtgatgaccaaattcgctgaggaggaggatgtacgtcgtagttttgaaaacactgctgctgactggccggaaatgcaaacgttggctggtgcttttgattcagaccggtggggcttccggcctcgcacggtggttctgcacggaaagtcaggaattgggaaatcggctctagccagaaggatcgtgctgtgctgggcgcaaggtggactctaccagggaatgttctcctacgtcttcttcctccccgttagagagatgcagcggaagaaggagagcagtgtcacagagttcatctccagggagtggccagactcccaggctccggtgacggagatcatgtcccgaccagaaaggctgttgttcatcattgacggtttcgatgacctgggctctgtcctcaacaatgacacaaagctctgcaaagactgggctgagaagcagcctccgttcaccctcatacgcagtctgctgaggaaggtcctgctccctgagtccttcctgatcgtcaccgtcagagacgtgggcacagagaagctcaagtcagaggtcgtgtctccccgttacctgttagttagaggaatctccggggaacaaagaatccacttgctccttgagcgcgggattggtgagcatcagaagacacaagggttgcgtgcgatcatgaacaaccgtgagctgctcgaccagtgccaggtgcccgccgtgggctctctcatctgcgtggccctgcagctgcaggacgtggtgggggagagcgtcgcccccttcaaccaaacgctcacaggcctgcacgccgcttttgtgtttcatcagctcacccctcgaggcgtggtccggcgctgtctcaatctggaggaaagagttgtcctgaagcgcttctgccgtatggctgtggagggagtgtggaataggaagtcagtgtttgacggtgacgacctcatggttcaaggactcggggagtctgagctccgtgctctgtttcacatgaacatccttctcccagacagccactgtgaggagtactacaccttcttccacctcagtctccaggacttctgtgccgccttgtactacgtgttagagggcctggaaatcgagccagctctctgccctctgtacgttgagaagacaaagaggtccatggagcttaaacaggcaggcttccatatccactcgctttggatgaagcgtttcttgtttggcctcgtgagcgaagacgtaaggaggccactggaggtcctgctgggctgtcccgttcccctgggggtgaagcagaagcttctgcactgggtctctctgttgggtcagcagcctaatgccaccaccccaggagacaccctggacgccttccactgtcttttcgagactcaagacaaagagtttgttcgcttggcattaaacagcttccaagaagtgtggcttccgattaaccagaacctggacttgatagcatcttccttctgcctccagcactgtccgtatttgcggaaaattcgggtggatgtcaaagggatcttcccaagagatgagtccgctgaggcatgtcctgtggtccctctatggtgagtaccccaggcagttttatcctatgccgtgtgctgagctctgtgtctctactgctgggacttgacatgacttccaggaacttcaaggtcccagagaattctttcaggatgaatggcccagatgacgtccagctggctaaaatgccaggaccggaatctggctcattgtccacacctgggaaaggtctttcacaatacagggccccgcctaagactaaaggaaaggctctggggttgaaacccaggaatatgtggtttattttattattttaagtcagagtctcactctgttgccaggctggagtgtagtggcacgatctcggctcactgcaaactccacctcccaggctcaagagattctcctgcctcaggctgccgaggagctgggactacaggcatgcaccaccatgcccagctagtttttgtaattttagtagagatgggatttcgccacgttggccaggctggtctcgaactcctgacctcaggtgatccacccgcctcagcctcccaaagtgctgggattacaggcatcagcaagcccctcccatgaatgtgaccgctcaggtttgtggactgcttatttggtatggtgtccagggccgtgctgtccagtagagggttctgtgatggaaatattccatgtgccttgtccagtaggacagccaccagcctcataagcctgttgagcatctgaaacatggtgagtgagactgtggaggtgaaactcatctcactccatttcaactcatttgtatttttttctttttttgagacagagtctcactgtgtcaccaaggctggagtacagcagcatgatctttgctcactgcaatctctgcctcccgggttcaagcgattctcctgactcagcctctcaagtagctgggattataggcagtgccaccatacctggctaatttttgtatttttagtagagacagggtttcaccatgttggccaggctgatctcgaactcctgacctcaggtgagccacctgccttggcctcccaaagtgctgggattataggcataagctgctgtgcccggcctcatttgtatttaaatagtcacacatagctgatgcttgctgaatagtgcaggtctagaaaacacactttgctggactgtctcagtgtcatcctcctatgacccagaacacagcagtgacgaatgtggacaggctgggtggacgaggattacttgaggccaggtttttgagaccagcctgggcaacaaagtaagaccctgtctgtggacaggctgggtgcagtggatcatgcttgtaatcccagcactttgggaggctgaggtgggtggatcacgaggtcaggagttcgagaccagcctggccaacatagtgaaaccccatctctactaaaaatacaaaaattagccaggcatggtggcgcacacctgtaatcccagctactcaggacgttgaggcaggagaattgcctgaacccaggaggcagaggttgcagtgagccgagatcacgccactgcactccagcctgggcaacagagtgagactccatctcaaaaaataaaaaaagcctcaaattatcacatggggctgggcgcggtggctcatgcctgtaatcctagcactttgggaggctgaggcaggtggatcacactaggtcaggagttcgagaccagcctggccaacatagtgaaaccccatctctgctaaaaatacaaaaattagtggggcgtggtggtgggtgcctttaatcccagctactcaggaggctgaggcaggagaattgctggaaccccgcgggcggaggttgcagtgagccaagatggcaccactgtgctccaacctgggtgacagagtgagactctatctcaaaaaaaaaaaattctcacatggaagaggtctggcacagcacctgctgtgtgctaaggccttgataacagggcagctacctttggttggaaaacaagtacaaatgcttgctttttaggaggtgagctcatgtcagtgcagaaagaaagaacagcttgcccgttactttgttctttccacagccaagaggagtcacagcctgggcaattttcctgtagattggctgaaaacgtgcgcagccacaggctaagcactgagatgggaaatttacatatcataaaaagtcaaagctacttgtgttcacagctaccctgtgctatacttacattcattcgctttcttcttcttttttttttttttttttgagacggagtcttgctcggtcacccaggctggagtgcagtggtgcgatctcagctcactgcaacctccacctcctgggttcaagcgattctcctgcttcggcctccctagtagctggactacagttgcccaccaccacacccggctaacttttgtatttttagtagagatggggtttcaccatattggccaggctggtcttgaactcctgaccttgtgatcctcccatcttggcctcccaaagtgccgggatgacaggcgtgagcgactgcgcccggcctctatttttcttttattcttgagggcaaacccatgaggttagctccctgttcacaaacgtgggaaggtatacactcagacacgtgggaaggtataaactcagacaggagatgattgccagtggacgggagactaattgctccaatttttaggtgtacgatacaatattaactacaggcacgacattgaacaatggatctctagaactttttcatctcacatcactgacccttcatgcccatgaaacgataactccatctcccctgctccccaggcccccggcagcctccactctactttctgctattttagacatttcaaagtagaatcatgagcccagtgtattggtggctcacgcctgtcatcccagcactttgggaggccaaggtgggtggatcacttgaggtcaggagtttgagaccagcctggccaacatggtgaaaccccatctctactaaaaaaatacaaaaattagccaggcatggtggtgggcacctgtaatctcagctacttgggaggctgaggcaggaaaatcactcgaatttgggaggcagaggttgcagtgagccaagatcatgccactgcactccagcctgggagatagagactccgtctccaaaaaaaaaaaaaaaaaaatgtagactcatgcagcattttgcagtatttgtccttttgtgactggtatagctcacctaacataatatcctccaggttcatccacactgtcaaaaacggtagaatgtcctcctctaaggacgagtaatattccattaacatatgtatcacatgttctttgttcatccatggatggacatgtaagttttccagatctgagctattatgaaaatgccacagtgagcgtgggagaccaaacacctcttccacatcctgatctcagttcttccgggtatacacccagaggtaggattgttaggtcctatggtagctctattttaatatttttttaggaacctctgtactgttttccacagctgttgcacagttttacgttcaagtggggctggaattgaagcaaagatctgatgcagggctgggcacggtggtggctcacacctgtaatcccagcaccttaggaggccaaggcgggggcagatcatgagatcaggagttcgagaccatcctggccaacatggtgaaaccccatctctattaaaaatgcaaaaattagctgtgcatgatggcatgcgcctgtagtcccagctactcgggaggctgaggcaggagaatcgctcgaacccaggaggcagaagttgcagtgagccgagattgcgccactgcgctccagcctgggcaacggagcgagactccatctcaaaaaaaaaaaaaaaagatctgattcaggagctggcggttcccagtcatgcctgcataccccctcgggtatcggtatatccgggaggcagggtggacaccgggctagtcatgcaaagtgtgatggcagccgctaagttgcctcagggcctctaaagccaccgtggtctcacctcgagagctcggtccctctcctccgacgtgttgccacgactgctcatgttaaactccatcccatgagcccatgtttctatcccccctgacataggatgcgggataagaccctcattgaggagcagtgggaagatttctgctccatgcttggcacccacccacacctgcggcagctggacctgggcagcagcatcctgacagagcgggccatgaagaccctgtgtgccaagctgaggcatcccacctgcaagatacagaccctgatgtaaggctgcccgccccctacgagagaatcccttcccatgacgctatcccagctctcccctacctcctgagagacccatctgaagcctttcaagtgcagcctgagggcataagtgccaccaaaggtgtaggaaccaagttcccaaaagcaca[132 bp omitted]tgaaaccccatctctactaaaaatacaaaaaaaaaattagcagggcatggtggtacgtgcctgtaatcccagctacttgggaggctgaggcaggggaattgcctgaaccagggaggtggaggttgcagtgagccaagatcgcaccacggcattccagcctgggtgacagagtgagactccatcttaaacaaaaaacaaaaaaaaaccttgtgctgatgttactgaagcaggctccttgacaccaggtttggacgggtttggatggattaagctccccaaggcagggattgttaatactctttcatacaccattcccagtagctggcccatcacaggcactcaggtattcgttgttttaaaaggaaatacaattaattagaaatttgcaagttagaatgggagaaggatgggaaggaaaaatgaggatacaactaaacatcaccagtgtcgaatgtgtctccccttccccattgcaggtttagaaatgcacagattacccctggtgtgcagcacctctggagaatcgtcatggccaaccgtaacctaagatccctcaacttgggaggcacccacctgaaggaagaggatgtaaggatggcgtgtgaagccttaaaacacccaaaatgtttgttggagtctttgaggtacgtctctggtagagcttttgccttgtttttcttcgtttttacttgtgtttgaaatgattacataaagtggcaaaaattaaagagctgcaaagatggaaaagttttggtgatggatggtggtgacgattgcaggagttgagtgccactgaattgcacacctaaatagttaaaatagtgcattcggttataaatactttatcacaattaaaaaaactcagtttcattaaaaattgttcatgcagaggcaaggtctcgtttggttgctcagtctgatcttgaactcctgggctcaggtggtcctccccgcttggcctcccagagcactgggattataggcttgagccaccatacc[145 bp omitted]gaaactccatctctaccaaaaatacaaaaattagccaggcgtggcagccacctgtaatcccagctactcgggaggctgagtcaggagaatctcttgaacccggcaggcggaggttgcagtgagctgagaccgtgccactgcactccagcctgggcaacaagagcaaaactctgtctcaaaggaaaaaaagtgcccttctggcagtttctcccagtggttaatcttacatactatcgcataatatcaaaactgggaaacagatcctggtatggtgtgtgtacattattctatagcagtttattacatctagatttgtgtaacagtcacagtaaccaagatgctctggggtcacacacccctccctaaccgcaccattcctaatcctcaggagccacgtgtgtcttccatctctgtataaccttgtcattttgacaatgctcttaaagtgaaatcggtgtggtacatcgtcgcctgaaactggctttgctccatcagcgcttgagatccacccaagcagtcaagtgttacacactttcttcctttctgttgatgatggccattcaatgctatggagtaccacagtttaaccattcaccatccagggacacgttggttggttggttggttggtcggtcccagtttgtggctcttactgtggtttgtaagtcctgggaaggtggttttttcattagattagcttggtttagagatacaactatttaatgtttatatagttttcttttctttttgactgagtctagctcagttgctcaggttggagtgcagtggcatgatctcagctcactgcaacgtccacctccctggttcaggcaattctcctgcctcagcctcccaagtagctgggattacaggcacccgccaccatgcctggctaattcttgtatttttagtagagatgggggtttcaccatgttggccaggctgtcctcgaactcctgacctcaagtgatccactggctgtgccctcccaaataaagtattctgagacagacaagtacaagccctgctttgagctttgttagctggcacatcaactaacatcgaagaatagtaagaaagaagaagaatttgctttgtaccatgtggtgtttgcctggcagccagggaactgcactttaagaagatgtaacccagggaaattagccaaagcataaatgttgtctcaggacggaaatgctgtgcctgacatcgtgtggggtttatctgggaacagatggaggaagctgcatgctcactcttttgctcactgtctgcaccacaagtgcagagagctggagcttagattcaaagaataaataagatagacattgtcggaaaagatggatggaggctatttggggccaaggaaggaaaaagcatgaagtcacttaggtccagtttcctggaagtctaacgaatttaccttctcataactcaactaatgaatttaccttctcataactcacaggggcaggagtattgctctcttctcttcactcctgtattcccggaacctagaactgctcttttcctgacacctggcccgtattccccaaagtacttattggatagagggatgggatgatcagctaagtctctaaatgggagactttgacattggaagatggattgggccacatcgtgaagggtttccattcactatcacattgaggagttggaacttcctttattcaataacgacagatgcttgattctgcgtatagtacatgttccagggatgtgctgatgaatgaaacgagattctttgattcaataacgacagatgcttgattttgcatgtagtactacgacatgttcctgggacatgctgatgaatgaattgagattcttttttttttttttttttttttggagacagagtcttgctctgttgcccaggctggagtgcagtggtgcaatctcggctcattgcaagccccacctcctgggttcacgccattctcctgcctcagcctcctaagtagctaggactacaggcgcccgccaccacg[175 bp omitted]ttgattctgtgtgtagtagtatgacatgttcctgggacatgctgataaatgaaacgagattgttttattcaataacgacagacgcttgattctgcgtgtagtactacgacatgttccagagatgtgctgatgaacaaaacgagattcctgctctcatggtgctcacaggccagcacagggagagcagaacaagacaaaaagaatgatgtgtgcacacacacggcaggagcatgtataggcttggagagctctaaaagttctgtctaaaattcaacacagaccaggcacagtggctcatgcctgtcatcccagaactctgggaggctgaggcaggtggctcacctgaggtcaggagatcaagaccagcctggccaacatggtgaaaccccgtctctactataaatacaaaaattagtcgggcatgatggcatgcacctgtaatcccagctacttgggagactgaggcaggagcatcacttgaacccaggaggcagaggttacagtgagccgagattgcgccactgcactctagcctgggtgacagagtgagactgtctcaaaaaataataataataaaataaacctgcttccttcatctctgccctagccaggtactggcctaagtgtttcgtggctattctaatattctaatcctcacaaccatcgctgaggttggtagtgctgttgtcctcatttccagggcataaactgagttgcagagatgctaagctattcggttaacagggaattaagtgatgtgttagatttgggggtggatgtgctggctcgtggggtagctgtgtacgttcctctttcgtaaatactgccggtcatcccggaagctcgtgcccttcagcaaatgctcgagtgccctttgtgtaccaggcaccgtcgcagctgccgaggggaccatagagaacaaagcaaccaggcctccaccttcatggagatgacattctaggaaggaagacaggcaggaaacaagcactaacataagtatgtggaacgttgggtggaggccgggcacagtggctcatgcctgtaatccagtgctttgggaggccaaggcgggtggagcacaaggtcaggagtttgagaccagcctggccaacatgatgaaaccccgtgtgtactaaaaatacaaaaattagccaggtatggtggtgggcacctgtaatcccagctactcaggaggctgaggcaggagactcgcttcaatccgggagatggagattgcagtgagccaagattgcgccactgcactccagcctgggtgacaagagcaagaccctgtctcaaaaaaaaaaaaaaaaaaaaatgttggctggggtgggttgctatgaatgttgagacaatggagggaagtggggtaggcaccatttaaggtctggcttacccgaaaggcgaccttcaagagacatgaaaggacgtgaaccccatgaaaacctgagggagggaggaggggaggttgcactggaaggaacagcaacttctcaggcccggaggcaggagcagacagagttcgaggaccaggaaaacggccagcgctgctggcgtgtgctgagtagaggggaaatgggctgctttggacaagagctgggattgcttcatgctgcctgtctctgcaggctggattgctgtggattgacccatgcctgttacctgaagatctcccaaatccttacgacctcccccagcctgaaatctctgagcctggcaggaaacaaggtgacagaccagggagtaatgcctctcagtgatgccttgagagtctcccagtgcgccctgcagaagctgatgtgagtgccacttcctttccaccaggattatcgtaacttccaccaggattatcgtaacttcgattctccaggtcatggtgggagggaaatgagcagatgtacaaaccaggggtgaggaaggaagttgggacctcccaagacctgcccagtgtggggtgtaagagtgacctgaaaaacatctgttcttgctcccaaactctaaatggagataaaaggtggacgcgggaatcagccaggtggaaattgcataatgaccttccctcctgataaagctctcctgggcgtgaggcttatgtgtgcagcttgcactgtgggttagtgaatgcttggccccaccactggagaggtatacccactcagtcactcaaagaacatgggtggcggtcaggctcccctctgcctggtaaagtccaggccagagctcatgcattctgggcttctgggcacagagaggctcaaaaaggaggagggtcacccaaaatcccaatcccacctccttctatggagacgagggagcccagagcagggatgaacccaggcctgtgttgttgtagcagaagggcctccgagtggaaacgcagggggcagcagttctgcacccctaacacctaaagggatatcacttctttccttttccgtgtcagagttttgttgttgcccaggctgagtgcagtggtaagatcctagctcactacagcctcaactcttgggcccaagtgatcctcccgtcttggcctcctgaagttctgggactacaggtgtgagccaccatgcctggcccacttgcttactgataactgatctagggaggggaggcgaagcagcagcaacagttacagcaaccactattcaatgcttactgagctgtgccaagcacagcgctaaaatccctccaacccttcctcgctgagttctcaaaacaggtctacggagcaggtgctgttgataaccctatcgacagatgagacagcttcagaaaggctgtgtcacttgtccacagttggacggtgctcagatggtgatgccgggagtcaagggtggggctaattcagctgagccacccagcgtggcagccattatccacgtgtggccagccaaatctaaattaaatgggaaagtcagtttcctcatcacactagacccatgtcaagagctcagtagccatgtggggctagcagctcccattctggacagcacagctctaggtgacctttaatcttacctggatggcagtgctggtatcagcagtgagacatccaggctcagagggtgacatctgagctctcgatcacaccctgagctctcgatcttgggtgtcatattctcaaggggaaggggcgttcactccaagttctctttacgggaaaacacctatcactcatgtagcagactgtttctggaatcacttcagtgctacataaaaagctgcttaaatggccaggtgtggtggctcacgcctgtaacccagcactttgggaggccgaggcgggcggatcacctgaggtcggcagttcaagaccagcctggccaacgtggtgaaaccccatctctactaaaaatacaaaaaaattagctgtgcatggtggcaggcgcctgcaatcccagctactcgggaggctgaggcaggagactcacttaaacccgggaggcgtaggttgtggtgagccaaggtcacgccattgcactccagcctgggcaacaagcgcaaaactccatctcaaaagcagacagagtatctagtttatgcctaagggtcatgatgtgttagatgtagttttggggggtggtcttgctcactgttctggagtacagtggcacaatcacagctcactgcagcctctacctcccaggctccagggatcctcctgcctcagcttcccaagtagctgggactacatgcatgtaccaccatgcccggctaattttttctttttagagacagagtcttgctatgttgcccaggctggtctcgaactcctgggctcaaacagtcctcctgcctcagcctctcaaagtgctgggattacaaacacaaaccacggtgcccgccctaagtgtacttttaaattggaaaaattggcccagtacagtggctcacgcctgtaatcccaacactttgggaggctgaggcaggcagatcccctgaggtcaggagttggaggccagcttcgagaccagcctgaccaatatggtgaagccctgtctctaccataaatacaaaaattagtcaaacatggtggtgcatgcctatgatcccagctactcaggaggctgaggccggagaatcatttgaacctgagagcagaggttgcagtgagctgagatcatgccactgcactccagcctgggcaacagagcgagactccatctcaaataaataaaaataaataagaaaataaataaattggaaaaattactcattccggcaaagccttacatcatagccatgtggggactggaaatggctgagcagtgattgttgcccagccattccccattgtgactggcagatctaatcacccacaatacttagagtattcttttggggctgatgcactggagttgagtttgcaagttaaaggcagagaggatgcgacttcaccatatgtctgcaaggacatgccaactatgggggtgatacgtctttcccctccttgtaaaggagggaaagatggaactttaagaaggcatctcatcatgtcctctctggggctctcttcttgcagactggaggactgtggcatcacagccacgggttgccagagtctggcctcagccctcgtcagcaaccggagcttgacacacctgtgcctatccaacaacagcctggggaacgaaggtgtaaatctactgtgtcgatccatgaggcttccccactgtagtctgcagaggctgatgtgagtctggcttgctcccctgcaaggacttcctagctttctaacatagcatggtgtagctctcaaagcagaaggcagtggggagggggtgtggacatcatcacatgaagggacctggtatatgctgaattctgtccatgtctcctaggtttcatcctttcttggaaaattctgtgtctgcctttgtgttatcttacagtgggaagtcatttgttcaaggacagtcagttctcataattggaggtcatcatgttctacaaagtcactcttgagcactgaaccagccagcatggagccattgcccctgggagaggtacagggttagcttcctgtgaacctctagtcacgttttcatcaatcgatgaaaatgtatttcatgtttctgttcaatgacttttacttgatacacatcgttgattcgttaacattgagcacatgaccaacggcaccgtgactcgtgcctgacaaagcctatctgacacaagtgatggacctcacagcctccccacgctccccagcattggagagcactttggcgctatgctaggaggtcattttaaacaacactattgcagcggggcgcggtggctcacacctgtaaccccagcactttgggaggctgaggcaggtggatcatttgagctcaggagttcaagaccagcctggccaacatggtgaaatcccatctctactaaaaatacaaaaaattagccgggtgtggtggcgcatacctgtaatcccagcgactcaggaggctgaggcaggacaaccacttgaacctgcgaggtggaggtggcagtgagctggcatgagctgagattgtgccattgcacgccagcctgggcaacagagtgagactgcatcacaaaacaaacaaaattgcccacaaaaagcacaaaaatccaacaaacacggcactaaataccctcaaaaaggacattgttgacagtggagagctgaaatcagttcagcctccactgggagcaacgtgtgtctggagactcaagttcttctctgctctgcacacatgcatgaccaggaaggactgagcactcccggtattgatttggagaattaccaacacattatagcaagtaggaaaattcacaaatacagaatccataaataatgaggatcaattgtgttgattactactgcatttattagttgctagtgatacagacacaatacagatgcagttctcattatttttccaaaagttattggggtacaggtggttacatgagtaagttcttttcttgttgtgttttgagacagtttggctctgtcacccaggttggagtggcatggcgcaatctcagctcactgcaacctccacctcccctcccaggttcaagcgattctcctgcttcagcctcccaagtagatgagattacagctgtgcaccaccacacctggctactttttgtatttttagtagaggcagggtttcaccatgttgtctaggcttgtcttgaactcctgaccacaggtgatctgcctgcctcccagagtgctgggattacaggcatgagccaccatgcccagccaggttacatgagtaagttctttagtggtgatttgtgatattttggtgcacccatcactcaagcagtgtacactgcaccatgtttgaagtcttttatccctcgcctccctcccattcttcccccaaaatccccaaagtccattgtatcattcttatgcctttgtgtcctcatagcttagctcccacatatcagtgaaaatatacgatgtttggttttccattcctgagttacttcacttagaataatagtctccaactcatccaggtcactgcaaatgctgttaattcattcctttttatggctgcatagtattccatcatatatgtatgtgtgtgtgtgtgtgtttctttatccactcattgattgatgggtatttgggttggttccacgattttgcaattgtcagttgtcctgctataaatatatgggtacaagtatctttttcgaatattgactactttttctctgggtggatgcccagtagtgggattgctgggtcaaatggtagttgtacttttagttctttaaggaatctccacactgctttccatagcggctgtactagtttactttcccaccagcagagtggatgcgttccctgatcaccacatccaccccagcatctactgtttttttatgttttgattatggccattcttgcaagggcgatgtggtatcacattgtggttttgattgcatttccctgattattagtgatgttgagcctttttcatacgtttgttggccatttgtatatcttgagaattgtctattcatgtccttagcccactttttgatgggattgttttttcttggatttgtttgagttcgttgtagactcgactctagattgtgaagattttctcctactctatggattgtctgtttactctgctattctttttttttttttttttttttttttttttttttttttttttgagatggagtctcgctctgtcgcccaggctgcagtgcagtggcgtgatctccggtcactgcaagctctgcctcctgggttcatgccattctcctgcctcagcctctcgagtagctggtagctgggactacaggcgcccaccaccacacccggctaatttttttgtgtgtgtttttagtagagacagggtttcacca[137 bp omitted]caattaggtcccagctatttatctttatttttattgcattcacttttgggttcttggtcatgaaatccttgcctaagccaatgtctcgaagggtttttcccatgttatcttctagaatttttagaatttttatagttttaagtcttaggtctttttttttttttggagacagagtcttgctctgtcacccaggctggagtgcagtggcacgatctgagctcactgcaacctccacctcccaggttcaagtgattctcctgcctc[210 bp omitted]tgttaggtgagagatgaggatccggtttcattctccgacatgtggctagccaattatctcagcaccgtttgtcgaaaagggtgtcctttctccactttaggtttttgtttgctttgttgaagatccgttggctgtaagtatttgggtttatttctgggttctctattctgtttcgttggtctatgtgcctatttttgcacgagtaccacactgttttggtgactatgccttatagtttgaaatcaggtagtgtgatgcctccagatttgttctttttgctgagttttgctttggccatgctggctctttttttggttccatttgaattttagaattgtttaattctgtgaagaatgatggtggtattttgatggggattgcgttgaattttgtagattgctttggcagcatagtcattttcacaatattgattctacccatccatgagcatgggatgtgtgtccatttgttcgtgtcgtctgtgatttctttcagcaatgttttgtagttttccttgtagaggtcttttacctccttggttaggtatattcccaagttgtgttgtgttgtgttgtgttttgcagctgttgtaaaaggggttgagttcttgatttgattctccgcttggttgctgttggtgtatagaactattgatttgtgtacattaatcttgtatctggacacttgaattattttatcagttctaggagctttctggaggagtccttagagctttcaaggtaaacattcatattgtcagcaaacagtgacagtttgactttcctgacttggatgccctttttatctttctctcgtctgattactctggctaggacttccagtactgtgttgaagaggagtagtgagagtgggcatccttgtctttgttatgcatgcatctaagtgaagagacaacctgaacaggctaagtgtgagcaacaaggctgtgtattcacttgggtgtgagcgggctgagtctgaaaagagagtcagcgaagggtgatgggattggagctagtttttttttcttttttttattatactttaagttttagggtacatgtgcacaacatgcaggttagttacatatgtatacatgtggcatgttggtatgcacccattaactcatcatttaacattagatatatctcgtaatgctatccctcctccgaccccacaacaggccccagtgtgtgatgttccccttcctgtgtccatgtgttctcattgttcaattcccacctatgagttgagaacatgtggtgtttggttttttgtccttgggatagtctggagctagttttatcggttagggataagcagtggaaagtaacagtctgggaccgtttattgcgggcaggggaagaatgtcacatggtacactgtcacaaggtgggaggggtcacagggcacaatgccacaaggttgattgatcagttagggtagagcatgttacaatgatagaatgttgcaggttggctaatcagctaagacaggagctagctgtttttcttctgtggttttcctgttatcctagactttctggctccaagaggccttctggatgtgtacatgtgggtcacagaggtcaccatggcttgaccatggtgcatcctgctcagaagacctcagtcttattccagttctcaaagggaatgctttcaacttttccccattcagtattatgttggctgtgggtttgtcatagatagcttttattacatgaaggtatgtcccttgtatgccaactttgctgagagttttaatcataaagcattgctggattttgtcgaatgcttttcctgcatctattgaaatcacgtgatttttatttttaattcagtttatgtggtgtatcacatttattgacttgtacatgttaaaccatccctggtatgaaacccacttgatcatggtggattatctgacatgttgttggatttggttagctagcattttgttaaggattttagcatctatgttcatcaaggatattgctttgtagtttcgtgtgtgtgtgtgtgtgtgtgtgtttctgttacgtccttccctggtgttggtattagggtgatgctggcttcatagaatgaattagggagggttccttctttctctatcttgtggaatagtgt[273 bp omitted]tgctgggatcacaggcgtgagccatcgcgcccagccaccacttcttctttgaacgtctggtagaattctgtgaatccgtctggtcctggacttgttggtaatttttaaattaccatttcaatctcactgcttgttactggtctgttcaggatatctaattcttcctgatttaagctaggagggttggatctttctaggaatttatccatgtcttctaggttttctagtttatgtgcataaaggtgttccttatagccttgaatgatcttttgttttcagtgatgtcagttgtagtatctcctgttccatttctcagtgaggttatttggattttctcttctcttcttggttaatcttgccaatagtctatcaattttatattttcaaagaaccagctttttgtttcatttatcttttgtatttttttgtttcagtttcacttaattctgctctgatcttggttatttcctttcttctgctgggtttggggttggtttgctcttgtttctctacttccttgagggtgtgaccttatagtatcagttgatgctctttcagcctttttgatgtaggcgttgagggctatgaacctgttagcactgcctttgctgtatcccagaggttttgatagattgtgtcattgttgttcagtctgaagaattttttaatttctgtattcatttttgacccagtgctcattcaggagcaggttatttaatttccacgtgtttgcatggttttgaaggttccttttggagttgatttccagttttattccactgtggtctgagagagtgcttgataaaatttcaattttcttaaatttattgaagctcattctatggcctgttatggtctatcttggagaaggttccatgcactgttgattagaatgtgtattctgcagttgttggatgaaatgttctgtatagatctgctatgtccatttgttccaaagtatagtttaaatccattgtttctttgactttctgtcttcatgacctgtccagtgctgttagtggagtattgaagtcccccagtattactgtgttgctatctatctcattttttaggtctattagcaattgttttatgaatttaggacctccagtgttaggcacatgtatgtttagaattttgatattttcctgttggacaaggattatataattatataatgtccctttttgtctccttaactgctgttgctttaacgtttgtttcatctgatctaagaatagttacccctgctcgcttttggtgtccatttgcatgaaatgcctttttgtacccctttactttatgtgagtctttatgtgctaggtgagtctcctgaaggcagcagatggttggttggtgagttttttattctgcattctgtatcttttaagtggagcgtttggaccgtttacattcagtgttaggatggagatgtgaggtaccattgcattcatcgttctctttgttgcctgtgtaccttgggttttgttttttgtttttgctttttaacttatatttttgttttgtaagtcctgtgtgatttatgctttaaagaggttctgttttgatgtgtttccaggatttgtttcaagatttagagctccttttagtggagtcttggtaatggcaaaatttctcagcatttgtctgtctgaaaaagactgtatctttccttcatataaaatgcttagttttgctggatacaaaattcttggctgatacttgttttgttcaaggaacaaacaagggccccaaatcccttctggcttgcagggtttctgttgagaaatctgttaatctgataggttttccttcataggttacctggtgcttctgtctcacagttcttaagattctttccttcatcttaattttagataagctgatgacaatgtgcctaggtgaagatctttttgtgattaatttcctgggtgttctttgtgcttcttgtatttggatgtctagttctctagaaaggccagggaagttttcctcaattatgcacccaaatatgttttccaggcctttagaattcttttttctcaggaataccaattattcttaggtttgcatttaacataatcccagacttctggaggctttgttcaaatattcttttttctgtctttggtgg[132 bp omitted]acctccgcctcctggactcaagcaattctcctgcctcagcctcccaagtagctgggactacaggtgtgtgccgccacacccagctaacttattttttattttttatatttatttatttatttatttatttatttagagacggagttttactcttgttgcccatgctggagtgcaatggtgcaatctcagctcactgcaacctttgcctcctgggttcaagcgattctactgcctcagcctcccgagcagctgggattacaggcatgcaccaccacgcccaactaattttttgtatttttagtagagatggggtttctccatgttggtcaggctggtatcgaacttccaacctcgggtgatccacccacctcagccacccaaagtgctgagattataggcatgagccaccgtgcccagcctgtatttttagtagagataaggtttcaccatgttggccaggatggtctcgaactcttgacctggtgatcctcccgccttggcctcccaaagtgctgctgggattacaggtgtgagccaccgtgcccagcctgaatttctttcttctacttgttcaattctattgctgagactttccagaccatttcacatttctaaaaatgtgtctaaagtttcctgatttttttttattgtttttaagctatttccttgaatatttctccctttgcttgtatcatattttggatttccttgcattgggcttcacatttctctaatccctctctgattagcttaataactaagctcctgtattttttcaggaaattcgaggatgtcttcttggtttgaatccattgctggtgaactagtgtgattttggggggatgttaaagagccttgttttgtcatattaccagagttggttttctgcctccttctcatttgggtaggttctgtcagagggaaggtcttaaacctggccaggtgtggtggctgacacctgtaatcccaacactttgggaggccaaggtgggcagatcacctgaggtcaggagttcgagaccatcctggtcaacatcgtaaaaccccatctctactaaaaatacaaaaattagccaggcgtggtggtgcatgcctgtaatcccagctactcagaaggctgaggcagcagaatctcttgtgtccaggaggcagaggctgcagtgaactgagagcttgccactgcactccagcctgggtgacagagcaagactcctcaaaaaaaaaaaagaaaaaaaaacaaatatgaccccaccctacacagaagcagactgcagctgggaggagagcagcagctcacttgaggccatgctggggaatgagcatcacgatcttctttcccatgtgtgtgccccacaggctgaatcagtgccacctggacacggctggctgtggttttcttgcacttgcgcttatgggtaactcatggctgacgcacctgagccttagcatgaaccctgtggaagacaatggcgtgaagcttctgtgcgaggtcatgagagaaccatcttgtcatctccaggacctggagtgagtttcccatgggcgttgggtcaactctatcatactggggtctggagttcctgaaaggtcaagagataggagcagggagaccggaaccaaaaactgctttcagggtgagctgacactcatttttccaagggcaatctaggtaaactgaggtgttgacaccacggtgagcatgggaagggccgatggagcctcatgggaggaaccatgagttctgagaagcccttgatacctaaacactgtgcattcctcagaggaaggcatcttgccctaagttcatcttcagctatttatctgtatggagaagggagagtgcttgtctcttaatctctttccctctggggctcaaatttcttcaccctttgttgaaatgtttctattgaataggaatatcccattattaaacagactgtagaaaaagtaaaagagctcagtgagcaaaaatcgatcttcagtctcacaaccatgcagtcatccctgttagtggtttggatgtcttctggggttctcttgttctagatgcaagcgtgcatttgatgttttacaaagaaaggatcatagtagtcagcacttaatgcaacttaatgcgttctctttttttctttttgtttgtttgtttatttattttgagtcttgctctgttgcccaggctagagtgcagtggcatgatctctgctcactgcaacctccgcgttccaggtttgagcgatttttctgcctcagcctcctgagtagctgggattacaggcatgtgccaccagtcccggctaatttttgtacttttagtagagacggagtttcaccatgtcggccaggctggtcttgaactcctgacctcaggcaatccacccactttggcctcccaaagtgctgggattacaggtgtgagccactgcaccccgccaagcacttaatgcattcttaacatgtggcaggcagagcactaaatattttctatatctaatctcatgtagtctcaccacccccccatcatatccagtggagaactgaactcccaagaaaccaaaactttggcattggtctcacattgtgtctgaggatatgtctattataataaatgaagtacagtaaggtattccattgaatggtgtaggctttaaaaatctcctaaaatttaaaaatctcctaaagctggacacgtaccttatatctagtgttttcatcatgagcataaatgatttcattccaaacgcttgtatgcttggtagcatttgcttattcattacaaaggcagaattaatggaccacaagtggggtatcattttgagatctctcccttcccaagaataaaataaaggactttggtatggattctagttcacaaacttctgagtgcccccaagtattaattctaccatttgttttaattgtttcaagccctacttctgcatggtgtagaatcttagtcaattagagacatcatttttttgagatggcatttaagtgctgggagattaactggatctctccatcaccatttatccatgctagcgccaatgactaggtcacccctacctggtcttcaagggttggccctcacaactgcatccgttttttcttttgtttgttttttgctttgctttgttttggtttggatttttgtgtgttttgtttggttttggtggggttttgttttgttttgtttttgtttttgtttttgtttctgtttttgttttgagacagaggttctttcttgttgcccaggctggagtgcaatagcgcaatctcagttccctgcaacctccacctcctgggttcaagcaattctcctgcctc[135 bp omitted]tggcctcccaaagtgctgggattagaggcgtgagccactgtacccagcctgcatccctctttattcttcacccgatggctcctgaggatggaccatccccctccccagtgctatcatcctacccttagcctcccaagctgaagacagacttggaggccgtttcagtcatttctcctgcgataaaccattcagatgttatttatggggccacccaccccatcttccccatttttcctaagaatagaagcacaaaacttccccttttggattccagacctatcagcatttcagtaacttctgtccccttttctctccatcttggctctgtcagaatctttccagtttctcctcctcccccgtggagaatcttgacctcatctccaagtggaagcaaactctgctgtgctcatttcttttaaagatacctttagccaggtgtggtggcacatgcctgtaatcccagctactggggaggctgaggcaggagaattgcttgaacccaggaggtggaggttgcagtgagccgatatcgtgccattgcactccagcctgggcaacagagtgagactttgtcttgaaaaaaataaaaaataggctgggcgtagtggctcaagcctgtaatcccagcactttgagaggccgaggcaggcggatcacctgaggtcaggagtttgagaccagccttaccaacatggagaaaccccgtctctactaaaaatacaaaattagctgggcacagtggcacgtgcctgtaatcccagctattcgggaggctgaggaagggagaatagcttgaacctgggaggtggaggttgcagtgagccgagatcacaccattgcactccagcatgggcaacaagagcaaaactccatctcaaaaaaaattaattaaaaaataaagataccttcaatcacaccagacactttccccgcctccgctatcattcctctctcaagccaacagataccacgtggtctaagctgttcacaggagtggacaaaacagtggcccgtcaggaaggaataaaggaaactccagttaatgctgctgaaccttctcccgctgttccactttcctcgagagaggcagactctctctattccccgcctcttgcaggttggtaaagtgtcatctcaccgccgcgtgctgtgagagtctgtcctgtgtgatctcgaggagcagacacctgaagagcctggatctcacggacaatgccctgggtgacggtggggttgctgcgctgtgcgagggactgaagcaaaagaacagtgttctggcgagactcgggtaacttcctggggcgcctctttgcgggccgggctgggaggaggtgggggaccccagcatgaggttgcttgaacagggatgatgatgatctggtttccatgagtccctcaagttagatggagtgcaaccttcgcagcaccacagatctgggtataagttccagctcggctcctatggatgagacggatgaagtggcaaatgcttgggaacaaggtctggaggtagaaaaccctcaactgccgattgaacgacccctgcgtgctagtcctggtgctaaatggcggaagtatggaagtgaaaagacctttgtgttgtagtgtgaacagtctagagacaaagacgggcagaaagcaagtgattacctgagtggtccttaaaacttcagtgagcatcagagccagccaggggcttaagacagagctccaatatagtggactatggttcagccatgaaaagaaaagtgctgaggctgggcacaggggctcacgcctgtaacaccagcactttgggaggccaaggtgggcagatcacttgaggtcaggagttcaagaccagctgggccaacactgggaaaccctgtctctactaaaaatacaaaaattagccaggtgtggtggcgcatgcttgtaatcccagctattcgggaggctgaggcaggagaatcacttgaacccaggaggtggaggttgcagtgagccgagaccacaccactgcactccagcttgggtgacagagtgagactccatctcaaaaaaagtgaaaaaaaaaaaaaaaaacgtgctgatacgttccaccacatggatgagccttgaaaacgtcgtgctgagtgaaagaagccagccacaaaaggtcacctggtgtataattccatttgtataaaatacccaaaacagtcaagttcgtacataaagtagaggggttgtcatggctagagggaatgggaagtagaaggggggcagctgaattggtatggggtttccttttacggtgatggaaatattctggaagctagcagaggtggctgcagcgcactgtgaactactctagaatggaatgtttaccatgtgtgagcactgaccatgcactagtcttgtatgtgtgctgcttataaccctccatggcactaggggaggt[137 bp omitted]atctccgccttccgagttcaagcctcagcctcccgagtagctgggactacaggtgcctgccaccatgcccggctacttttttttgtatgtttagcagagacagggtttcaccgtgttagccaggctgcttttaaacttctgacctcaagtgatccgccggcctcagcctcccaaagtgctgggatgacaggcgtgagccaccgcgcctggccgggacccttttccttcttgaagtcacacattgttcttcaagctcatcacaccttggttctctgtcccctcaacttctttctacgtggtcatgtcccttctttagttcctcttcgatctagctttgtgttttatttttatgattttattaaactttatcttatttcttattaaatcaaggcttacttatcttactataataccatcactcatcttttagctccatgttctatttttctttctctgtcttttttttttttttttttttttttttaagatagagtcttgctctgtcccccaggctggagtgcagtggcgcgatctcagctcactgcaagctccgcctcccaggttcaccccattctcctgcctc[134 bp omitted]ggcctcccaaagtgctgggattacaggcataagccaccgcgcctggcctgtttttctgtcttctaaatgcagtgtctcccttagccttctgttctggggtgtgtccacctacaaacactccaagcttcactgaaccgcactctccaccctctctgctctttggtagctgagaatcacaggatcaaaacaggcaatggcgagttgctgttgtgtgcagtcagggatcatggatgtaaatttgttttcccagcattagttgtctggtccactcgttttccccaccacctgagtcaatttcacaacaattcattccctggagacatgcgcacctaccttgttctactgggtgcttcacaaataactcctaccccttcaaataatataaaatcatttactaggaaagccctaaatcttctatcaagaagccaactatgatctgcaccagtacacacttcctcctgtaacaataaagaaagcatggccgggtgtggtggctcatgactgtcatcccagcactatgggaggctgaggggggtggatcacctgaggtcaagagttcgagaccagtgtgccaacataggaaaaccccatctctactaaaaatataaaagttagccgggcttggtggcgtacgcctgtaatcccagctactcaggaggctgaggcaggagaatcactggaacctgggaggcggaggttgcagtgaaccgagaacgtgccactgcactccagcctgggcaacagagcgagactctatttctaaaaaacaaaagcatccctgcggtagttaatttaacccatgttaatcagaggttagtttcctccacgatgggaatcccacaatcatccgtgtgcagcaccttataccatcactgatttacctctcccttgcctctatcctcagcctccctactggatgttttgtctttataaatgcttagatattattttagaagcaaaatgaaaaataagcattcaatcttatctcaccatctcgccataggtggctaaaacaacttgagctgcatctcattaactttttattctatcataagaattccagccgggtgcggtggtgcacgcctgtaatcccagcactttgggaggctgaggccagtggatcacttgaggtcaggagttcgagaccagactggccaacatgatgaaaccccgtctatactaaaaatacaaaaattaggcatggtggcaggcgcttgtaatcccagctactcaggaggctgagtcaggagaatcacttgaactggggaggtggaggtcgcagtgagtcgagctcgtgccaccacaccccagcctcagcgatagagcaagactcagtctgtgcattttggattttttctttttcaatctagaatgattaggacatgtaaaacctatatacccaccacctaatttaaacaatcattagtattttagtatatctggtgaactatttcagagcagcttacggattttgacatccaccccaaaataaccagcgtgctcccttcaaaatagaacacgcctataaaatgccattattatattcaatgaggtcccttggctttctgttgctcttaagatgaaattctaaacccttagtatgacctaggtgcccagcctccgctctcaccactgtctgggactcttttctagccatctagtcatctttgtttctcaaatgtgtctcctttccgcaagcacagtgtacaggtgatttttttatatcaatgcatatgtcaatatgtccttccgccttctcacctttcttcaggtgcagtgttgctttctctgcaggtctgtgttccttgttatgtttccttgctacaggcactctcagcctttctttcattgttttccacaactataatttgagttacccaccatctctcaaagtgagaaccaagcacagtagcctcacctgggaactcgttagaaatgcaaatatttggccgggtgcagtggctcatgcctgtaattccagcactttgggaggctgaggcaggtggatcatgtgaggtcaggagttcaagaccaacctggccaacatgatgaaactctgtttctactaaaaatacaaaaaattagccaggcatggtggcacgtgcccataatcccagctactccggaggctaaggcaggagtatcgcttgaatcccagaggtagaaggttgcagtgagccaagattgtgctactgcactccagtctgggcaacaagagtgaaatgctatctcaaaaaaaaaaaaaaaaggcgaatatttgggtctttcatcagaacaactaaaccagaaactgggaggcagagcccaccagtttcattttttgtttgtttttgttttgttttgttttcccaaagaaaaagtatcaaggtgaaattcatacgggttgaatgaagggtccatcatcgatctttggggttattttctgggtgtcctgaccctgcaggttgaaggcatgtggactgacttctgattgctgtgaggcactctccttggccctttcctgcaaccggcatctgaccagtctaaacctggtgcagaataacttcagtcccaaaggaatgatgaagctgtgttcggcctttgcctgtcccacgtctaacttacagataattgggtaagtcgccagcaattgtcttctgagatacagacctgcttctgttccaggcttgttagctggtggagaagcagtttatgggaaaagttgacgtcataccttgggagccacattttactccattggtgagtgcccactacgttctgagtaccatgctggatgctggagatacaggaatatgggagatagaggccaggtgcctgatatcatggagttcacttctgggtaggttgggaagggcacagaaagaacgttataaatgtttatgctgaaaaaactagaattgctatatgatccagcaatcttacttctgagtatgttacccaaaagaattaaaaggaagatctcagatttcacacccatgttcatagtggcataatgcacaataatagccaagaggtggaagtaacccaggcgctcgtggatgaaaggataagcagaatgtggtgtataccaacaatggaattgtattcagtctcaaaaagaaaattctgacacatgctacatgatggaatcttgacatgccgagtggaataagccagtcctaaaaagacaaatactgtaggattctacctcgaagaggtacttataagagtgaaattcatagagacagaatggtgatttccaaaggattggggtgaggggttggggagttgtgtaataggtgcagagttttagttttgcaagatgaagaattctggcgatagatggttgtggtgatgcttgcacagccgtgtgaatgtagttaacagcactgaacaattcacctagcaggaagtttcttcagtagctcacacacatcatttcagcttcccctctcattcagtccttgtacaagtctggagggctgagttgatggagttcacagaagttcttcaggaccatctcttaagactagaagtttctttcatgacaaagtggcagttcactgatgtcttcagtgtttagtggtagaaaaagcatttgtcatttaggagctcatatccgtagactaacaggagttcagagacttccctgagcatgaaggaacacagttgtacttgaagggagtaaaatcttgaccagagaaatgtacagctggcagcattgatagcccatttgaggttggttgtggtatatttattttattttaagttttttgagatggagtctcactctgttgcctccaggctggagtgcaggggtgcaatcttagctcactgcaacctccgtctcgcaggttcaagcaattctgctgcctcagcctcctgagtggctgggattataggtacgtgccaccacgcccagctaatttttacatttttagtagagaagagttttcaccaggctggtctcaaattcctgacctcatatgatccaccagcttcagcctcccaaagtgctggatgacaggcatgagccaccacgcccgacttccttgtggtatatttatatcaatagaaaatttctcagttgagtaactgttttctccagtatggtccagctgatggcagttgagtttatccagggttcaagttatggcacatgggtataaccaggaagaagtcaagagtggctgtggtagaccctggaatcataggaggaaggtgaagacaggatgaggaaggtgaattgagaaacatggctcaatgaatctgggagtcttggtttggtcaggactgttacagtgacaaaatgagctgaaaaggtggagtgctgttgaaagaatgtgtttatatccttgatttatgaggcactatagccattgacaagatcagtggtgactatgggacttagtagttgaagtaggatagaagtcagacctggatttactgattgacctattatgggtctatttccccatctgtgaaatgggggcggtgctatgtatctatttaaatatgtttatttctcctctagtagactataagcttggtaagggtgggaaatttgccttgtccatccctatatgagaagtcctcatttaatgtcattgatacattcttagaaactgtgactttaagcaaaacgacatataatgaaaccaatgttttctcgttgttatagcaatgactctgaagaaaatgacgttcttcgagaatctgctctagtagttttgcttaaagtcactgtttccaagaacctatcaatgacattaagggagaacttactgtacctccccaaaccctataacacgacccggcacagagactctgaggaaggaattcatggatggactgaaaggtcatgcctgcatcttaggactgttaggactgttgtaaggaacagatgcctttaaaagctcagcatagtatctgacatatccaagtttttttacatgcagagaattacttttattctatagggaacatgctactgttatcaagcaaaagtggctcactgcctgatgtgctagaggccaatactgtgacactggagatttgtcgggggaaaaaagccctatattgcaggtcaactcacaaggagacaggagtcaagctcaaatctgtctccccatgctggcttcaaggcagcattattattagaaaaggttcagggagtagatcttgagattagtaggtgattggaagaaaagaggagatctagaaagtcactgggcatgcataattatctattcatgctacatcatgggttgcatgtgccaatttagggagagttagtataaaacatggtggaaattcaggctgtgacatcagcaagctcattctgtgcaaactccagtctgccatactttttctaaccgatttcagccagttctttcataagtggagggggagtctccatgtttcagcaagctgtttcttttcttgtctgccatcctacaaactcaataatttgttagtcattggtttaactctttggggcacgttccttaagagtacaagaaaaggtttgagatccttgatgaggctaccaggaattttgaagaagggagaagagtcgaaagcaacatctcagtaacgagtcctctctctgcctccccaggctgtggaaatggcagtaccctgtgcaaataaggaagctgctggaggaagtgcagctactcaagccccgagtcgtaattgacggtagttggcattcttttgatgaagatgaccggtactggtggaaaaactgaagatacggaaacctgccccactcacacccatctgatggaggaactttaaacgctgttttctcagagcaagctatgcacctgggagttccttctcaaagatggagaatgatttctgattctcacaaagccctcaatggtagtgattcttctgtgttcactctacgttggttactggatttgaaggctagagaccttcaagtcataggactcagtatctgtgaaatgtccgtcatatctcagagcatatagagggaattaaataaacacaaagcatttggaaaagttgtcaagtggttttcttaactagtggggatatggtttaggagcagagaggttgggaggacctagatcttcaaaagcagcccctgaatttgggtaccacaactagtggtggttttttgttttttgtgtttttctttttgttttttgttttttttttttttttgagatggagtcttactctgttgcccaggctggagtgcagtggcacgatcttggctcactgcaacccctgcctcctgggttcacagcattctcctgcctcagcctcccaagtagctgggaccacaggcacccgccaccacgcccggctaactttttgtacttttagtagagacagggtttcaccatgttggccaggatggtctcaatctcttgagctcgtgatctgcctgcctcagcctcccaaagtgctgggattacagacgtgagccactgcacctggccaactactagttttttaaagcacatacctgaataccaaaggatggtgttactgtcactcaatatctgaactataaacataaagccgaatttattccttagtgtaatgaaaagctggtctaccacagtatctctgagtagagcagacttctgatctttgtggggaggaatttggggaggtacagaatgaggctaaaccttgaaggtgtaagttggcctgtggttactcaggtgaggctgattggtagaggtgtgttcatcagagtgcatcccttctgactggctgaatttccaatgcaaagggcagctgttgattggcttgcaaaagcatgttcactgaggtaagttgtcttggatccatttaatggatttaaacctgtctaggtagctacttattaccatggctacagaaccatcagtctattcctagaagagtggaaaactcttacattcttaccaaaatatacttcttatgatttcttgtatttatttctctcatccatgatgacgatgatgaatgatgataatctaacacagccctgtataccatgccctgtcctaagcagtatgaattaacttatttggtctttacaacaccttagaggtaagtatattttttgcttccatcttacagatgaggacattgaggtgcagaaaataatgcacagcaaggccgggcggggcagctcacacctgtaatcccagcactttgggaggctgaggcaggcggaacacttgagatcggtggttcgagaccaacctggccaacatggtgaaaccccgtctctactaaacatacaaaaattagccccgtgtggtggttcatgcctgtaatcccagctactcgggaggctgaggcaggagaatcactcgaacccgggaggcagagcttgcagtgtgctgagatcatgccactgcaatccagcctgggtgacagagcgagactccatctcaaaaaaaagaatgcacagccagtaagtagcagagctgccattcagacccaggaaatccatttctggagttcattctactcattgaaatgttgcctctaccatacaaccaccttccacgagccattcactgtactgtgtgtaaacctctaactccagcagcccctttcaaaccgggggaatgttctagcatcattccctgtcagcgtatattagacaggggctggcatgcccccttttctgctcccattgcaatggagctaataaagtttatatcagatataggaggaacgtcaactctgcagtttatttgtggttatagtattagcattatcttcaacctatggtttctttgcaggaatactttttaaatacttgtgtgttctgggagtgtttgtttataaaatacttggacattggaccaatgtgatagggtttacgaggtgaatgggtgaagtagtgggggaaaagcccttccgaatcagagtatctgtcttcaggatacctcttctcccacatgggacacaggcccatctaacataaagacagggcaaggaggccgggtgcagtggctcacgcctgtaatcccagcacttggggaggctgaggtgggcagatcacgaggtcaggagattgagaccatcctggctaacacggtgaaaccccatctctactaaaaatacaaaaaattagccaggcgtggtggtgggtgcctgtagtcccaactacttgggaggctgaggcaggagaatggcgtgaacccgggagacggagcttgtagtgagccaagatcgtgccactgcactccagcctgcacaacagagccagactctgtctcaaaaaaaaagggggggggaggggggcaaggaaaccaccattaatgtttgtgttaacaaagcattactatgttagtcttgttaaagatctatcaccttgtatatagctaaaaatacacaatgccctcctgtgtccagtgcattatcttgagcactgctgcctaccccacccccaacagttacaaatatcccactttgtaaagttacagccaaagggaaggtcaaagggaaaagccaagtttagaaacaatatttttattttttagaaacatctcattatcttgcccaggctagtcttgaactcttgggctcaagtgatcctcctgcctcagcctcccaaagttctgcaattacaggtgtgagccactgtgcccagcttcaagttttttatgctgacctgtgttcaaattctggctgtttcgaatgatttttatgacactatacaaatgtcaacctccatgggcttttgatttcttatctgtaaagtaggaaaaattgtacttaccctatagaatcaagaagagatgaatctctgtaaatcagctgtagaagtggctggaacattcactccaccaatatttacctacttgtattagttgtttgttgctgtttacaacattaccacaaactcggcagttaaaacacgtgatctcggtgtttgagtccagatatgactcagctggatcctctgtctcagggtctcacaaggctgcgatgaaggtgttgaccagggctgtggtctcatctgagacccaaccgggacaaggacctcttccaagttcatgcaggtcccaggaacatccattttcaggctgctggactgagggccttggtttcttgactgtcagccccaggccatccccagctcttttctgcttggccgtctccatatggcagattggatcttcaaagccagcaaaacagtcactcagcaagacagacttacaatctcatggcatcacagaagtcagatcccatcaaccctgccacattccgtttggatagaagtaagtcacaagcccctcccacacttgagggaaggggatctggcaagatgggaacaccaggatgaggatcatgaaaccgcctagaatctgatgcactactccacactggcagaaagctgtgttctactcactgctgcctgttggaaaagagtttctttctcttgagcctcttggccatttccaagggtagagggagttacccaggtgctacggctaggagggaggaactggaccttctaagtgctcttcacaagcctcctgtctccagatgtgtacacactttcctctttcatgcagcaagctttgctgagggtgggatgggtgggcggaatactgattgtggcgaagtgctaggaggctgcagatacagaccacttgcctcagagtc[132 bp omitted]tgcaacctccgcctcccgggttcaagcaattctcatgcctcagcctcctgagtagtggggactacaggtacccgccaccacgcctggctagtttttgtatttttagtagcgatggggtttctccatgttggccaggctggtctcgaactcctgacctcagttgatccacccgccttatcctcccaaagcactgggattacaggtgtgagtgaccatacccagcctggcctcagagctttgaataatagggatgataccttgatttctacccaactccttgtttcttattctaaattcctaaacgtagaggatgaagtaatgatgagtctgtataaaccctataaccctatgtgctggccgctgccctcaggctgatagtgcaggacaaagatccctgttctcctaaaatgtattaccttctaatgaaggacaaatgcatgaattgcagctgttctcacagctaaaatggcaggttcgcaagagactaggactattctatttttctagactagctatctttgaggtctgagaaaaacttttttctgcactgctggtttttcgtcaagtttgggacatgacataccatgaaaatgtacccttcctacatagtttttcgttttgtcttgttgtttgtttttaacatttgtaccacggggagggaagagcatcaggaaggcaacggacccggtcctggagggcaaccgtggggagtcccaggcccccgctgcctggtgcatcacatcgtgggtaggacaggtgggagcgctgtctccctgctgatctgggctcttatctctatgaggaaggaccctttcctcacccgtgagtcaaacgatagagaattcacctccacctgccagccacgctgtagctggggtgtgtgtggagccgcacaaactctgatgctttgagctgcatggcacagaacgtccacctgagatcactgcgtagaagcttcctgggaaggcaattccagggtcagtgaaccccgcgggacgccagctccctggttgagtttcccctgatggccgctgggtggcagcagagcgtcatcttccctgagaccctcccgggagcagggcgggctcctccccgcatccccactgtggattttctcaccgcaggcactgctgacggtgggaccggccacttccacatcggggtcccgcctgtgggctgtagggtgttcagtgacgtccctgcttttacctgccaggtgccttccctcccgcagttgtgacaaccaagaaagtcttcagacacagccggatgttacccggggcaccagcctgagacccgctggtccacgggaagcagggagccctccctcaccagcacacccagcggcctccccttcccctcgccggacgcgactggctcacaggaaatccgtgtcagccctgctcagaaggtatcagccacttgttggttctattggaggtgacagctgcttagcagacacccaagaatgtaggtttgttctttagctttattccccattgtcaaaatggaatcaaccaagattatctggaggcccaggtgtaaaatgaaaatgtgggtgctttgttcaaaaattaagaatttcaagatgactgtgagtcactatactgagtgcaaagccattctgagccggggtcctggatgaatgacccaagcagctggcctccattgcagctgactggaccaggagctagcgtttgaagaacagccagtctttaagctgcctaatgacctgtaggccgcctgtgaccaaggtaagagatgaagtaggtatccttgttcacaacagccaaaaggtgcagacaacccacgtgtctatcagcagatgaatgggtaaacaaaatgtggtctatccacacaatgaaatattattcagccatgaaaaaaagaatgcaggctgggtacagtggttcatgcctgtaatcccagcacttagggaggctgagttgggaggctcacttgaacccaggaatttgagaccagcctgtgcaacatggcgaaaccccgtcactactagaaatactaaaaattaaataggtatggcggtacaagcctatagtctcagcccgttgggaggctgaggtgggaggatcacttgagcctgggaggtcaaggctgcagtgaaccgagattgtaccactgcagtctccagcttgggtgacagagtgaaaccctgtctcattaaaaaaaaaaaaaaaacaacaggtgcagtggctcattcctgtacttctagcactttgggaggctgcagcaggcaggtcacctgaggtcaggggttcaagtccagcctggccaacatagtgaaacctcgtctctactaaaaatacaaaaattagcccagggtaatagcgtgtacctgtaatcccaggtacgcaggaggctgaggcaggagaatcacttgaacccaggaggcggaggttgcagtgagccgagatggcaccactgcactccagcctgggcaacaaagtaagactccatctcaatttaaaaaaaaaaggaataaaggaatatagtagcgatacgtgctacaacatggatcaacctcataaacattatccactgtaaagaagccagatacaaaaggccacttgtatgattccattgatatgaaatgaccagaagagggaaatccacagagacacaagatgagagtttgcccagggctgggagaggagcagggaatgagtgactcttcctggcacggggtttccttttggagtgatagacgtacaactatgtgaatatactaaagcattatttaattgtacaccttaaaatgggtgaattccatggtttgtaaattattttttaaaaagcaaaaaatgatgaaccaatatagttgcctccatctgagatctgattcagaattcctgaggaaataaagcagttaaaaggcaggaaattaggctggaaatttattagtgaaagtggaagatgtggtttgcagagtggagagagctcagggctgtacttttatgcagggggtgttatcagcacagtatccagggcttgtgaagttttcattagcctgaaaatatcttagaaacctggcagggtgtggtggctcacgcctataatcccagcaatttgggaggccaaggtgggtgggtcacttgaggtcaggagttcaagatcagcctggccaatgtggtgaaaccccatctgtattaaaaacaaaaaatttagctgggtatggtggcaggcgcctgtaatcccagctgcttgggaagctgaggcacaagtatcacttgaacccaggagacagaggttgcagtgagccaagatcatgccactgcactccagcctgggcaacagagtgagactgtctcaactggggagagagcaagcttcaggttcctgagccccacggccaattctggtatggcgggacccaggtgaagcctgggaatatgaattttaaaaagctttcctaagccattctgatgcaagtgctcttcagatcacactctcaaagccagaactgcaaaaacgaagctctgagtgtaccacaagtgttggtcagagagaatacgggctggagggtgaggaccctgtttgatggagacagaaaagagaaggaaactctggaggagaagagcgaagacaagtcctgactaagaccataaaccaggggttggcaatttttttctgtaaaaggccaaataggccaggtatggtggttcatgcttacaatctcagcactttgggaggccaaggcgggagcatcacttgagcccaggagttcaagaccagcctgggaaatgtagtgagactctgtctctacaaaaaataaacttgaaaaaaaattagccaggtgtggtagtgcacgcctgtggtcccagctactcaggaggctgaggtgcaaaaatcacttgaccccaggaggtcaaggctgcagtgagccatgatcgcaccactgcactccagccagggcaacagagtgagatcctgtctccaaaaaagagccaaacagcaaatattttaggctttgggggccatttagtctattgtaactgctcagctctgctgatacagggtaaaaacaagcataggtctattgtaactgctcagctctgccgatacagggtaaaaacaagcatagaaaatacaaagagaattttgtcacatgcaacatggatgaacctggaggatattacattaaataaaatgagccaggcacaggaagatacagatggtccctgacttgtgatggatttgaccttacttacactggtgtgaaagtgacattcgttcagtaacaactgtccttcgagtacccacagaaccatctgtctttcactttcagtatgccatcaatcacatgaaatagtcaacactttattataaaatggactttgtgttggatgattttacccaactggagaataatgtaagcattaggagccaggtgtaaggtagggtaggctaagctatgaccttctgtgggttaaatatattaaatgcatttccctagactgggcaacatagagaccccatctctaaaaaaaaaaaatttgttttttaattagccagacgtggtgcacacctgtagtcccagctactcaggaggctgaggcaggaggatggtttgagcccaggagaccgagactacagtgagtcatgattgtaccactgcactccagtcatggtgacagagtgagacactgtctcaaaaattaaaaagtattttcaacctgtattttcaacttatagtgggtttatcaggacgtagccccgttgtaaatggaagagcatctgtattgcatgatctcagttatatatggaatctaaagtcaaactcacagaagcagagagcagaatgatggttaccagaggctgaaagtgatggggaggtggagtctggggaggtgttggtcaaaggatataaatgttgatgttacaggaggaataagttcaggagacctattgtcgtacaacgtggtgactatagttaacagcaaaatatcacgtacttgaaacttgctaagtaagtagatgttaagtgtttttttgttttgttgagacagggtctccctatgttgcccaggctggtcttgaactgggctcaagggatcctcctgcctcagcctcccaaagtgcagggattacagtcacaagccaccacacctagccctgatgttaaatgttcttaccacaaaaaaaaaaaaaaaaaaaaaagcatgtaaggtaacgtacaagttaatcagctcaatttagccattccataatgtatacattttttttaatggagtattgctctgtcacccaggctggaatgcaatggcaggatcttggctcactgcaacctctgcctcccaggttcaagcaattctcctgcctcagcctcccaagtagctgggattacaggtgcccaccaccacacccagctaatttttgtattagtagagatgaggtttcaccatgttggccaggctggtctggaactcctgacctcaggtgatccatctgcctcggcctcccaaagtgctaggattacaggagtgagccaccacacctggctgtaaacatatttcaaaacagcagattgcacaccataaatatatataatttttgtccatttaaaattttttaattaaaaaaatataaacattttgaagaaaacacaaaagcaaatgggtgtggctgtgttctcatgaaattttattttcagaaacaggcggctggctccatttggcctttggggcattttgctgacccctgctggagatgaggatcttgcagaccagcttgtctgtgtttcctgtttgtcctggactgactgttcctctgttacctgcatttctgtaagggttatgagctgggtgccagggatcagtggtgcaatcctggaaaggagcctcctggcagcttgaacggttgagggtacacaggaccgctcaggttaaggccctagcccaacctcttgccaaacccgccacacactggacctgcttgtctgtgatagtaggttttatatatcaacatgcctgagccacggggttcccagattaagcattgtttctgagtgtgtctgggagggtgtttctggttgagattactgtttgaattcgtggacttagtaatgcagatttccctcccttctgtgagtggactcatctcatgagagtctgaatagaacaaaaaggtgtagagggagtcatttaccctgtttgctccccgcctgcctgttggagtggggacgcctatcttctcccgccctggaactgggatttgcacccttggctcctctggttctcaggcctttggacttggactggaaccaccccacaggcattcctgtttctccagcctgcagacggcagatcgtgagactcctcagcctccacaatcacgtgagacaattctcatcataaacctctttctctgttctgagaactgcatcatcagtcgtgtgcaaatatcaagtgtatttacacaaaactagataatacagcctaccatacacctaggctatatggagagaagtggcataatcacagctcactgcagccttgaactacagggctcaagccatcctcccacctcagcctcccaagcagctgggactacaggcatgtgccaccatgc[133 bp omitted]gaaaaccccatctctactataaatataaaaagcagctgggcatggtggcgcacgcctgtagtcccagctacttcgaaagccgagggaggagaattgcgggaacctgggagacggaggttgcagtgagccgagattgcaccactgcactccagcctgggtgacagagcaagactccgtttcattcattcattcattcattcattcatttagagacggagtcttgctgtgtcacccaggctgaagtgcagtggtgcgatctcagctcactgcaagctccgcctcccgggttcacgccattctcctgcctc[209 bp omitted]ggactctcgctgtattgcacaggctggagcctatttgctcttagagcctattgtttttaggctaaaacctggacaacatgttactgtactgaatactgtaggcaacggtaacacaacactaagtatttatatatttaaacgtagaaaagttacaacaaaataccaaagaaaatatttgaagatggtatacctatatggggcacttaccatgaatgaagtttgtagacatggaagctgctctgggtgagtcggtgtgtgagtggtgggtgaatgtgaagactgggacgttactctacactgctgtagactttataaacactgcacacttaggctaccataatttataaaatatttttctttcttcaagaataaattaaccttagcttactgtaacatttttactttataaacttttatttacttatttttgagacaaagtctcactctgtcgcccaggctggagtgcaatggtgtgatctcggctcactgcaacctctgcctcctgcgttcaagcgattctcctgcctcagcctcccgaatagctgggactacgggcacctgccaccacgcccagctaatttttgtatttttagtagagatggggtttc[132 bp omitted]actctcgtaataacacttagcttaaaacacaaacatagatcagacacgatggcttacacctgtaatctcagcacttggagagactgaggcaggaggatcacccttaggagttcaagaccagcctgtacaacatagaccccacctctacaggaaataattattttttaattagccgggcatggtggcacatgcctatagtcccagctacttgggaggctgaggtgggaggatcgcttgagcccagtagttcaagactgcagtgagctatgttcataccatgctctccagcctggacaagagagcctgactgtctctaaacacacacacacacacacacacacacacacacacgcatgcacacatgtgcattgtgcaactgtatagaaagattttcttgctgtacatccttattctataatctttttcctaatttctttaacgttttaatttttgattaagaaagacacacacacacattagtctagcctgcacagagtcaggatcgtcaagatccttctcttctaactccgtatcttgtccccctagaaggtcttcaggggcagtgacatacatggggctgtcttcttctatgacaacggttcttctgggttcctccagaaggacctgcctgaggctgctctacaattaatcggtttttttttttttgtaagtaggagtatgctctaaaataacgtttaaaaattatagtatacccaggggccgtggctgacaattataatcccagcactttgggaggctgaggcgggcagatcacttgagctcaggagctcaagactagcctgggcaacatagtgagacccatctctaccaaaaatacaaaaaaattagccgggtgtggtggtatgtgcctgtggtcccagctactcaggagactgaggttgggggatcgcttgaacctgagacgcagaggctgcagtgagccaagattgcgccactgcactccagcctgggtgacaaggcaagactccatctcaaaaaaaaaaaagtatagtaaatacatgaaccagtaacatagtcatttattaccattatcaagtactaagtgctgtacataattatatgtgcaatggcgtgatcttggctcactgcaacctctgccttccaggttgaagcgattctcctgcctcagcctcccgagcagaatagctgagactacaggtgtgcaccaccatgcgcggctaattttttgtttgttagttttgtgtgtttttgttgttgttgttttttgagacagaatcttgctctgtctcctaggctggagtgcagtgacaggatctcagctcattgcagtctctgcctcctgggttcaagcaatcctgcctcagcctcctgagtagctgggattacaggcacgtgccaccatgcccagctaatttttttatctttggtagagatggggtttcaccatgttggtcaggctggtctcgaactcctgacctcaggtgatccgtctgcctcagcctcccaaagtgctgggattacaggtgtgagccaccatgcccagctaatttttttatttttagtagagacgggatttcaccttgttggtcaggctggtatgtgcccaacttttataccattggcagcacagttggcctgtttaccacatcaccacacgcatgtgagttgtgcattgcactgtgatgttacaaggcctatgacagcaccaggtcgaagacattttccagcagcataatcttatgcgaccatcatggtccgtgcagcccattgtttggaatgtcatgcagcacatgactacacgcacacatacagaatattgattctgcttctcgaagaaccctaatgcattttccacactggcagattgtctgtcttctaagctacagcagcaaccaaatatcatgaatgctttttgggttcctaactctagttgggagtcccaagtgacttactgtggttaagcccccagaatgagttgtcaaggttcaggctctgttgatgatgaggaagaagaaccaggaccacctaccagttacctctatttgacagtcacttggctcagttctttggcttgggggtgtgtgtgtgtgtgtttgagacagtcttgatctgttgcccaggctggagtgcagtggtgtgatcttggctcactgcaacctccgcctcccaggttcaagcgattctcctgcctcagcctcccgagtagctgtgattacaggtgcatgccaccacgcccggctaacttttgtatttttagtaaagacagcattttgctgtgttggcc[141 bp omitted]tgcgagataaacatcatttaccatctttaaaggacgaaaaagctggagctcagaaaggttggtctcttgaacaggatggtaagactcgtacgttgctgaccaggaccctaaagtttttcccctaccaccaccatatactcttcatgagccatcctttcccaaataacctaaacacacacacacataaggaaacagcacttgctatacaagcaagtccagcttcaagacaagccccaggctccgctcaccatgcagaatgctgggcctaagctcctcctgtgtggaatgctgaagaaatcaccacccttgatgcaaaacgaggcctgtctcaaatcagcttgtggtgactgaggcaaaggtgggaatggggagtgactgtctaatggatacaaggtctcctttttggatgacaaaaatgttttggaactagacagaaatgatggttctacaacactgtaaatgtaccaaatgctaactgaattgtgcactttaaaatgggttcattttgttatgtgacttttaccagatgaacaaaaacactgtctatctaacacagatccatgcctttacatggtatgttatataataacactttaccgtcctttatccaggaccacgacttcatttcacagacactgcagttctcaagaatccaggtggtggcagcagagagctgagagaaaccagcacttccctaccggccctaaggaaggtccggaataagaatattgaccttgcccagttgcagtgagcatttctgtattgcaccagtcacagtggcgaatgcagctaaggagaggcaggtagatggagccacagaaccagatgtggtctgggcagtgtttcatcccaccaggaatgacagtgcatctgcagctcccagagggctctctgacaccctacctccaactgtgagcaatcatctttacctcctcatccagaggaaggaggccagcgggatgcagagcctcagcagcttcagcccaggctcagggctgaagtggagaagcatccaggccagttctggcattggtggaaccagctgggccgggggttgccccaggtaaaaggaacaggacccatcactgagaccacaggacagagaacactgagaatatagactcaggtgagatgcacggttgaggctcgtttggtttctgagaaccagcatgttggattatacccagaataactaatcctttgcccaattttcccattttccctcccagacacaaaataggacttactttccggctccctgaaagctgggcatggccatgtgccttgctgtgggggatgaacccagagcagaagaagtgtgtgtcgcttctggctggagacttcaagagcagtacacgatttgccaagtctctctgcctggccacggcaaatggtgagtcccagagagttgacaacgtggagcagagctccccgcaacccatggcaggcacggaacacaaacaagataaaatgttgagtgttgtgagcccctgacatgggggctgtttgcttgcagcataaccggtcctatcctgacacacgcttggggttgggggtcacaaactcaaatgccaggcaggcgatgtgagggaccacgtgggaaagagtgggtgaggacttgttcaaacacaggtgacaggctgggtgtagcggctcacgcctgtgatcccagccctttgggaggccgaggcgggcagatcacctgaggtcagaagttcgagaccagcctggccaacatggcgaaacctcatctctactaaaaatacaaaaattaggccagatgcagtggctcacacctgtaatcctagcactttgggaggctgaggtgggcggatcacctgaagtcaggagttcaagaccagcctggccaacgtggtgaaaccccatcatctctactaaaaatacaaaaaattagccgggcgtggtggctggagcctgtaatcccagcgactcgggaggctgaggcaggaaaatcacttgaacccgggaggcagaggttgcagtgagccgagatcacaccacttcactccagcctgggtgaaagaagctccatctcaaaaataaaaatttaaattaaggcagatgccgggctgtttaccagtccagcttttctgtacctcacctccgatttctgtacatctttcccttttttatgtctacagatcttgcaccacatggtcgcgctggagtctctgtgaatcggctgtgattctgggggctgcgtgattcgcgaatcattcattgctccattaaactcctttaaatttaattcggctgaagtttttcttttatcagagaggagacatgtgagacatgttccttctctctctgcccaattttcctgttttccttcccaggaggacacagggagaaggccaccgtccgcacgctgggaagcagccctcaccagacaccagacatgccagcaccctgatcttggacttccatcctccagaactgtgagaaattagtgtctgttgtttaagacacacacactacgtattctcttagagcagcctgaacagactaagcaggggtgtccaaggtagagaatacagtcataggttctcagtttctgtttgcggttggaccagtaaagacccttcctcatccctcttttccacttatcactagagacagaaactaaaatccatgatttcaggctgctaaaagcctaaaacagaacagcaacaaaataaggtgggttggacgagcttggtctacagcagtatgttttatttggttctcatggaggtattccactgtttttctttcaacatactgttgctggcttgaatcatggagatattaaggaagaaagtctaataattatgatgttacatgttactaaatctgtcttgccagcttctctatttaaaaaaatatatatatcaggccaggtgcggtggctcacgcctataatcccagcactttgggagactgacgggggcagatcacttgaagccaagagtttgagaccagcctggccaacatggtaaaaccccatctccaagaaaaataaaaattagccagggtggtggcgcacacgtgtggtcccagctactcaggaggctgaggcacaagaatcacttgaacctgggaggtggaggttgcagtgagccaagatcatgccactgcactgcagtgtgggtgac[131 bp omitted]ggctaacacggtgaaaccccgtctctaaaaatacaaaaaattagcccggcatggtggtgggcacctgtagtcccagctattcgggaggctgaggcaggagaatggcgtgaacccgggaggcggagcttgcagtgaactgagatcatgccactgcactccaccctggacaacagagcaagactccatctcaaaaaaaaaaaatgaaagctctggcatcgttaggtctgacttcctactggtgaccacagtcagtgtaagctggaaacggagctcctttctcctgggctacagtgctctggtttccccactctaccatctcacactggctcccttattagcctggtgctctctccagccccgtaggatgcacttgtaaccctgaatccaccccatgcacggagctggatggtttgggcacaactccctcttttggctttagttgaaacactcattccaggctcttggttttacaaatgagaaaatggggtttagcaaagagaaatgagttttcaaaccagaggccagtggttaggctgtgcagccacctctgctctcctcccctccctgtgtcagcagggatattccggagcctggtctgaaactgctgagctcgaagggcttggatccaacagtgctgatcatgaccacggaggtatggcctggtcactagggagagagctgagctcgaggggcttgtgtccaacagtgctgatgaccacagcggtgtgtcctggtcactgggagcggctgggctctaggggcttgtgtccaacagtgctgatgaccacagcggtgtgtcctggtcactgggagcggctgggctcgaggggcttgtgtccaacagtgctgatgaccacagcggtgtgtcctggtcactgggagcggctgggctcgaggggctggtgtccaacagtgctgatgaccacagcggtgtggcctggtcactgggagcggctgggctcgaggggctggtgtccaacagtgctgatgaccacagcggtgtgtcctggtcactgggagcggctgggctcgaggggcttgtgtccaacagtgctgatgaccacagcggtgtggcctggtcactgggagcggctgggctcgaggggcttgtgtccaacagtgctgatgaccacagcggtgtgtcctggtcactgggagcggctgggctcgaggggcttgtgtccaacagtgctgatgaccacagcggtgtgtcctggtcactgggagcggctgggctcgaggggcttgtgtccaacagtgctgatgaccacagcggtgtgtcctggtcactgggagcggctgggctcgaggggcttgtgtccaacagtgctgatgaccacagcggtgtggcctggtcactgggagcggctgggctcgaggggcttgtgtccaacagtgctgatgaccacagcggtgtggcctggtcactgggagcggctgggctcgaggggctggtgtcttaacagtgctgatcatgaccacagatgggacatggtcacaagggggcgccacatcccactttcctaccctaaccgcctcctcccccctcaactttcttccagctggggcgctttgcatttgtggctattggtgcgtgtgaacaagcgctccttgcgccccacagggcctctcccctgctgtggcgccgcctggaccacgcttcctgaactgcccttggaagttcccctctttcctcgcggctcagcttttccgtccacttactcgcccgtgtttatcgggcacgcacttcctgccagtggctctgctaagcaaggggacacggcggtgacctcgacaggcacaatctctgccctcacggggagtgggagtggttgcggggggggacacacacagatgatgactgaagagacaaaaagagacccctgggggtgagacatggaggaagtcctgggcatgggcaggtgtgacaggcagctgtgtgggaggcgggtcccaggggagtgagatccagacagacctgggcaagaggaaggggaccctccacccagctcacttcctgctctgaaggccgcagtctgtatccctgagggcagggactagcgtgtctgccccgctgcatccccagtgcctggagcggacgacgagtcgagggtgactccaccaggcggctacggtgtcaaagcagctccggcgtggggtccgactgtcctgagtttgaatcgggttctccatttactgagcgtgtgatctaaagtgagtggcttcacttctctgagctggctggcttctctgtgaccagcgacatccagccatgtctaaacagtgtgggcaaagccaggcagctgaaaccaactttgctgtgtcttgttttaagtcctggagaagtcccttccctctgagcctgctttcccgtctgtagagtggagggttaaaagaggttgttttgttttgttttgttctgttttgttttttgagatggagtctcactcttttgcccaggccggagcgcggtggcactatctcgaatcactgcaacctgtgcctcccggattcaagcaatttcctgcctcagcctcccgagtagctgggattacaggcgcccacccccacgcccagctaattttcatatttgtagtagagacggggtttcgtcat[138 bp omitted]acattgaaccgtcaccttgctccccagggtcccagctatcagccatatccaagccctcactgcggagagtagataggagacagtcacttcatacattcttggggacatgataagcgtctgacctctggggagggtgatacagctggatctgttgggatccaaacgcacattccccttcatcttacagttcctgtcaggacaagcagcacagggtatgggtcggatttggtccgattcttcctgctgcattggtacagtagcagaagactagaaacaggcagactgcacgtcagtcaggaattaaacactgtgtctgcacaaaggaacgctttgaaagtgttttttaaaataagaaatgtagatagggctctttggaacaatcataggtagatacataaataggtatagttgatagatacatagatagctaaagatagatgacagataacagatagggtacacaaatagattattgagagataatagatggtgaagataggaagatcacagatatgtactatggaggtagatgataaattgacacatatctatgtaagtagataacagatgatatacatgtatgatatagattatagatgatagacacatggatggtgtaatgataatagatgacagatgactgatacataaatgatagctacatatagatgacagatatagataattgatgcatagagggaataatagaagacaatggattggtatataaatgataatatatgtagatagatgatgtatagtggatatatacatgatacatgatgatgatagagatacatatgtaaggggcagaataatatgcaaggaatgctttcatttgataaatttattttatttatttattgagacagagtttcgctcttgttgcccaggctggagcacacttgtttgtgtttatttattttagtttttgagacagagtttcactcttgttgcccaggctggagcacatttgtttgtttgtgtttgtttatttattgagatagagttttgcttttgttgcccaggctggagtgcaatggtatgatctcagctcaccgcaacctctgcctcccaggttcaagcaattctcctgcctcagccccccgagtggatgggattatagccatgtaccaccatgtccagctaattttttgtatttttattagagacagggttt[133 bp omitted]gattcactgagtatttcaagggataatgcaggaagaagaatgaggaatttgggagttgagatttggtaagtaatctcttcctcaaagtatccattactttttttaaaaaaatcttatttgtgaccaaacatcaattgctgatccaaatccccctgccagagtccccaccagcctgaatgaggctgtccgtccacagtctacttgctgtcatggctagtggccaccccacttcacaagcatcccataaggtacagatagactgatctaagtgttggcattagattctgactattaagctctgctacttatcagctgtgagagcctggaggactatttaacctccccaaagcctctgttcccttatctgtaaaataggaacaataccctcttcgaactgatcgggaggcgttaaaagggaacgcgtatggattaaactgagctccatcatcccagactcagctgtgggggtgggggtggggggtggggtggggggggggggggaatctctgtccatggtgctgaaagaccggcgccagaaaatagggaatttctggatagacttgtccatcaaggcaggagaggaggcaaaatcaatggtgccagaggcaactccgtccccacccacagcctctttgagtggtagatatgaggggaaggagggtggatgtataccacagacacacacatacccacatgcgcacagacatacatatgcacaaagatacagatgcaccatccacacagacatgcattcatacatgcagagacacacacaattcacatgcatgcacttctctaaggatggcctggagtacaccagcccaagatgctctataaatggaaggttttctgacagaacaagttcagaaaatgctgcatgttttcacctacccctgccctggcccccagccccacccgggtatacagaatcatagtggaaagttctgagccgggtgggtgtggggggctagttttataattcatccagtcgactaaatcttggctcagcaccttccacctgccaagtactgttctgtgtatgagaaaatttcaatccggcagggtgcagtggctcacacctgtaatccctgcactttgggaggccaaggtgggtggactacttgaggtcaggagttcaagatgagcctgaccaatatggtgaaaccccatctctactaaaaatacaaaagtgagccgggtgtggtgctgggtgcctgtattcccagctacttgggaggctgagacagaattgcttgaacccaggaggcagaggttgcagtgagtccagattgcaccactgcactccagcctgggtgacacagcgaaactccgtctcaaaaaaaaaaaaaaagaaaacttgaatccagcattttcccaggttatttgaatacaagatcctgttttctccaaacatcttaacaatattccctggaacctacactctccaggctacccttagggaaacggggctgtatggaataaaatcatttccagatcaacactgccttcaggctggggagtaagctgggtggagggtccctttccactcacctgtctggccctcactccccctgggattgcctgtcacacctgccccctgcccaggactcctccacctcctgcctcctgagagcctctttttgtcccttcagcccttagctgtgtgtatcccctcccagcccccatgacagcagagatttgtgcctgttgaggtcactgctgtgcccccatgcttagcagagtccctcacaggaaagaagtgcccgataaacacctaagattaagtggattatcaactcagcagggggccgggggtggggggcatgggtgtcaggactttagatccagattaaggttctaccactttacaaaccagtagcctgggcaggctgcttcctctcctcgtaccagcttcagcagcagcagccgaggaatgatggcaaccacacagggcctttgtgaggactggactccgtaaggggcgtgaacgagtctgggcgtgccctccaccaaagtgagcatgagaggaatgggggccgaaggaacttctgcggtcactgccagggtgggtttgtgagcatggagcggccgcctagcctcaccttgccgtgggtgagcagctccaatgcaggtgaactacagggccgacggcaagtgccacaagaacccatgttcctttctttacctgggacccacgccgtgcctactgggcacggagctgctgcccaaaacacatttgtagaatgagtgagtgaggggtgggcaatgactacctgagtgcatgaatcagtaacggacagcgtgtgacaccaaagcacaggtcaggtgttgggtccggtgcaggctgatgtcaaggtggtcatgtgagctcgctcagttctgtattacaaagtgggatgagtagtgcagagctgggatttgagcctggctcctcgcccctgcatctttgctcatgcctgggagggcagctccagtgagttaacacatggcttggggattcccccctccacacacagtcatacaaggcaggcaggcaagctctcctttccacagggcaggaagccaagggtcagagaggttagtccacttgcccagggtcacacagccttaaggggcagggtggaaacttgccctgaatctttcttgctataggtgtcagctcctgccaccatatactggagcaggtagaagaggctgacccgagactcagtgtgcccgacttatggggcaccgagctgccaattctaccagacagggcacctcccatcctcccaggcctccagaagtgcccaaggccagagctccacagaaggaccctaggagaagtgagcaatgcttcctcagtctttgctaacccagcccactctgaactgccaaggttcaccccctcctttcgagtgacctgaaatttcaaaaactgacatgcaataccaattatctaagcaaggctctggccacttgagaacacgcttttttgatccacaatcactccctagtcctctaacaaatcctccaggatctgtagaccatcagtggccctggtttctaaaccccctgcctccagatgaggccccaggaccctcctcaagcacatcagggtgtgaaagggcagattaagggctctaactggaaatccgaatttctccttcaagtccccctctactatgaaacccccaagtcaaagacgcctgcagcttgccgcctccaatcgctcctgagtaatcgcagccttcagccaggttgaaaatacccctttgggaccctcactgcggcctcccaaggccccaggaacatgggtcctcaggacctgggctgtgggtccaggaaaccagtcgccatggtcgagcccccttctgatcatgaacaacagcgctcacctggcagggcggctgcagcggctctaccggaccaagcccctcgggcacgcgcactgcctgaaatgccctaagcgctcggctggactgtggcatacccgccctctcccccagcccctggctggctcgtctgcctggcccctgcagcagagacagctgagcgcaccatcctcctcccgtagggggcggggggtcctgtccccggagcggcagccgccgggacctcatctcccagcctccttcgcagggagccgcaaccacgggaccagccccgtgaacgacccaggtagggggacgtgcgccctttgcagtcagagtctcccccagaagctggaggcaggaggagggtgcttttggggttaggggcgggggccacacgataggagtggaggaagccagccgcccctgtgagagggtggtagaagccgtgggggctccttcccctgcagcgggcaggcctggccctgaccagtccgccctgccccatctacaagcagctcccaggccctgtgagtgcccgcaccatagtgaggatatccgcggacaggcccccctgcctagagccctccgcgggcgacccaacgggccactcccggggcgcggctgacgctctgctgatgccccggcgagagcctccgtttacccctcttgcccttctccctcccggactcaagaaccacgcagagggggacatttggatagtgccgtttattgttccagcaccccttcctccaccacgcccaggcctgggacaaacgggcacccgcctcctgcggcgctgcctctgctacccggaatccaggaggggaaggaacgactcgagctctaaggatgggacccggaaggcagaaaaaaataatggattggggcgggcggggagtcaaaaggtgggctgattaaaagaaaattctaaaagagaaaagggcccctggttctcttccctctctgggatcctctaaagggcctggtttctccattcctcgcagcaccccccacccccgccccggacaactgaggaagagcagggaaaatggccttccgcttggggcctggtcgccactcggcctctgcagttctctccattgtctctccggctcgcaggccgataacttaggaagggcgggccaggctgagggggcagagtctcgaggcggagaagtgaacgggccctaatacgccccagtgcccccccacggacggcgcagggacagaggagggcggggagccggggatgccgcggggtccatcgcaccccgtccgcttctccctgggtctcttggtcttgcacgtcgtcgctcccgccaagcccgaggggccctgcccgcccccccccccgggcccctcccctaccggccctccccaccgcggcactcggggcaccgcccgcccgcggcctcgtcgtcgtcgtcctcctcctccccgcccgcgcggtagtagctctgtccgcagctgctgcagaccgagggcgcgcccaccgcgtggatcttcttgtgtctccggagcgcggcgccctgcacgaagccctccccgcactccacgcagatgtgggccggctcctcgccccccgccgccccgagcccgtccccgtgctgggcccgctggtgcgccaggagcccggccccgtgcccgaagcccttcccgcactccagacacacgtacggcttgggggccggggcgcgccgcgaccggggccccgcggcctttgcccccgcgcccgccatggctgccgcggccgcggccccctcgcccggcgcgcccaccacgatgatgccctcgccatcgcccacggggatggcgatctcgccgtccgccgccaccgcctcttcgggccccttggcccgccggacgctagccgccagcaccttggccgccacgccaggccccgacagctccgggtgcagccgcaggtgacgcgcgaggctcttgggctggctgaagccgcggccgcagcgcgggcacacgaagggcttgaggccgctgtgcgagcgccggtgcttggccaggctcttgctctgagtgaagctgcggccgcagtcggggcaggtgtagggcttctcgcccgtgtggatgcgctggtgctgcatgaggttggagctccagctgaagcgcttgccgcactccaagcaggcgtagggcttctcgcccgtgtggatgcgccggtgctgcaccaggtgcgagctctgcgagaaggtcttgccgcagtcggcgcaggcgttgggccgctcgccggtgtgcgtgcgctggtgccgcgtcagcttggaccagtggctaaagctcttgccacactcgttgcagatgtagggggcgggcggccgcggccggggaggcgggccggctgggggcgcagactggggcggggacagcttggtgggaggccagctggggacgtcgtcatcatccatgatgaggatgtccactggaaagcaagagggtagggggaggtgagtcaagagaggcaagggctccacgcctgccttggctgctacgctggcctcgggtgcctcgctccccctggcgcaggacctgccctggtgtcctcagagtgtgcatcactccctgcattttactaagtatttattacccctctccccagctaagacctcagctctgtgtgagttaagaccctcagtttacccccaacctctagaacaatgccccagacacagaaggcctggtctgtaaacaaccaggcaacataagaggcatgggcgaggggcgggatccacggaaggctcccagaaaaggaccccgaaacccaaaacaccagcctggacgccgggggcagaggatgaggaaggctcacgggcaaaggttccactaggcagaggggccgcagggcttgaatgcagccctggacacctggtcctgagccagggagtgggtttggcaccctgaagacgtgcccgccagggagcgatggtgtcacattcgggctccaggaagacaatcctggctgcagacaggtaatgggattggagatgagcatgaaagccccacctccgaacctgggagtaaaacctggctcaacgccacctccattacagaggctatggtcagcccctggtgtgggggctcctgtctgctcagtgaggacaattcgggcacacagggctttgcctgcacatctttacactgaggacgcccttccagcagtcaacgaggcctttcacacttctgcaccaggcctgcccctgggggctctcccgggagggatgggcttgcctcctccccagctcattcactcctgagaagggtccgtgtgcagcttctacatttgctctcccttggggcctggtccagagcaacagaatcaggtgggagggcctcagcaagtgcatctctgacccccgtggacaccccaggtgcaccccacagggttttttcaaagccatgaatcacaattacaacgttctcactcctgaccttactagactgtaagctcctaagtctctatcccaacacctggcacggtggtgcccagcacacagagcccaaacaccctcccagatgccacgctggcaaacacgcaaggaagggccatgacgcccccctgcgctacacacttcagcgtcaggtcctcataagctgggagcacaaaactgagcctttacaagggagaaactgaggcactagggagtcgagtcacagcccacagctacacgactacaaagtggcaatgcccagaagcgcattagtagactgggtccaagaaacagccatctaccactaactgcggccgcccaccgctaaatcccccacccacaggcagcacaccctacacgctaagggagtgctccacaaagtgggatcctgcgaccagt[132 bp omitted]tggccaacatggcaaaaccccatctctactaaaaacacaaaaattagccgggcgtggtggcgcatgcctgtagtcccagctacttggaaggctgaggcaggagaatgacttgaacccgggaggcagaggttgcagtgagctgagatcacaccactgcattccagcctgggcgacagagcaagactccatctcaaaacaaaacaaaaacgcttatgctcaggcctccctccagacgcactgtatgagaaagtgccgggccgggcctgtgcttcagcaagccccccaggtgattctgatgccagctccagtgtgagaatcactattccaaggcagagagtattcgaatatggctcttgaacctgcggcagaagaaaacactccaggtgaagtcaggaaggggggagccttctggagagatggcatggagcccactgcgttgtcaacataaatcaaaaaatgttgtaagttataagcacattacttaaagatgtagagagaattaaaaacaaacatcagaagctatttgccccggggcagtgtgactgaaggggacagaaagggacgggcaggaaagagatttgttgtcaccgtaaaccgagccatactatctgaaccttacaagtgcttctacgcctttaattaaaataactgctttgttttcgaagctgtgaagaaagaaagtgtagcaatgctccctgtgactcagctatgaatagcatttattcatgacgacatgaattctgaacacaaaacttgtgacacagtggcagctaagacaggggcactggggcgggtgtgcagtacgtggagagcgcagtgagtggagagtggggagaggatgtgggagccatgtcctcacctcccattagatttgcaactatcaaagcaatttcatgagctctttacctagaaccagggagaaccccaaagagtgcatggaggggctccttcctctagaggcaaactgggagtggggaaggcaggaggtgggagctgttttctgctttaggccgtaggcgatctggcttctctacaggcatctctgcactactttttctaagtacgagttaagcactgttaaatggacagggtttaattacttaaaaggcagggctcttttacatcttgcagattcctgggctctgcgcaaaccttcccgtgctgcatctcagtaaggcccaggaaaccgcgcttcacaggcacagactggtttctgacaagaggctgcgtctgcaccgcgcatgggccaagatgagccgctccacttgccgcagccgcagccgcagccgcagccgaagccgaagccgaagccaaagccaaagccgaaaccgaaaccgaagccaaagccgaaggcgaaaccgaagccaaacggaagccaaagccgaaaccgaagccgaagccgaagccgaagccgaagcctcaccctcaccctcaccctcaccctcacaggagcaatgaggctaacagccttctccacctcacagcaccatctttaaagggattcaacgaattcccagcaagagaagagcacggtgaggagcacaagagttctcattcaattaaaaaaataagaaacaatgagggccggggccactctgatggtggcagcagttacccttgggggagggcagtgtccccagacgcctggccctgggctaaatgtgttccgtggattaccacatttaatccatggccaacactatcactgtcctctcactgaaggactcagctgaggtcccgaggggatgggctggggggcggtcctccactccagatcccctacgccccaggctctacctctacgcctcctgccccacctgcagcaccactactccaggaagcccaggtttcccctccacgggagataaatgtttctagagcaaaatctggaaatgcttttttttttttttttaagataaaattcctgagttcacactgatacttcccatagaaattcaggactaaagttttcattcatccttttctttgtgacatctgcacctcccttcagccccacggagaatcctggttctcaaggacataggggatgacagaactggaatatcccacagacgcaggggatggcgggagtgggataccccacagacacaggggatgacagagctggaatatcctacagacacatgagatggcggaactgggataccccatagacgcagggggtggcggaagtggaatatccatagacacaaggggtggcggaagtgggatccccatagacacaggggatggcgtaagtgggataccccatagacacagggggtggcggaagtgggatccccatagacacagggcatgacgcaactgggataccccatagacacgagatggcggaagtgggataccccatagacacaggaggtggcggaagtgggctaccccatagacacgggatggtggaagtgggctaccccatagacacggggtagcggaagtggaatattccatagacacaggggatggcggaagtgggatattccatagacacaggggatggcggaactgggatattccatagacacggggatggcggaagtgggatatcccagacacaggggttggcagaagtgggatattccatagacacaggggatgacagaattgagatattccatagatacaggggatggcgaaagtgggatattccatagacacaggggatggcggaagtggaatattccatagacgcaggagatggcggaactgggatgccctatattacaaccctcttgctgggtgcacacgcgatctcagggtaacaatgctactgctaccactgccaggcacaactcctggactgtgctgcacgcaccgtcctccttcccctcagtgttttctcggctgcatcccctccgtcaggtgcaggtcttggccgactgagacatgttcgggctcaggagactgacctgctcacaccctcctcccatccctttccctggtcagttgtctgaggctcattcgcttttaggttcctcaggaagggcacagaggaacggggttcacagggctgttgctgggtagcctgtctgtacccttcccatctgaaggtcccttttccgtgagtcataatgccattttctcctggcataaagtgctaagtccgagcatagtcatgttgactttccaagtcttccacgctttctgccacgaaggatcggtgacttcctttagcgtccagcaattctaacgcaaccatctgtgatttgctctttcaatgcgcagctttcatgtgttaaggggtgttccttgaatgagtttttactatccgctctattcttttgctttgggtctcttcttcagggactctgcctatccatatgttggattttcttttcctaacttgtttcctttaaaactgttttaatcttttttcattttatttatttattttgagacgcagtctcactttgtcacccaggctggagtgcagtgacatgatctcggctcactgcaaccttcgcctctcaggttcaagtgattctcatgcctcagcctcccgagtagcagggattacaggcatgagccatcatgcccggcttttttttttttttttttttcattttcagtagaggcaaggtttcatgttggccaggctggtcttgaacctctgccctcaagtgatccacccgccttggcctcccaaagtgctgggattacaggcatgagccaccatacctggctaattttgtgtgtgtgtgctcttagtagagacagggtttctccatgttggccaggctggtctcaaactcctggcctcaagtgatccaccagccttggcctcccaaagtgctgggattacaagcatgagccaccacgccccgccttttttttttttctcattttaaaatgatcctccttcttgccttcaatttttttaaagaacgatgtttttattcttgagttccttctacattagtcttcattctgaaaggtttttgttcttatttgcaaatctttgccgaggctgccccctcgtttctgagtttgtgattatgctgttctttcacacgctgcactgcctcagctcgttcacaatcagcggcccccaacctttttggcactagggactggttttgtggaagacaatttttccacggacagggtggggaggtagcaggggatggttcagggatgaaactgttccacttc[132 bp omitted]gaaaccccatcttaacttaaaaaaatacaaaaattagctgagtgtggtggtgtgtgcccgtaatcccaactactcgggaggttgaggcaggagaatcacttgaacccgagaggtggaggttgcagtgagccaatatcgcaccatcgcactccagcctcagtgatagagcgagactccatctcaaaaaataagattctcataaggaacacacaacctagacccctcatatgtgcagttcccgctcctgtgaaaatctcatgccgccgctgacctggcagaaggcggagctcaggtggtaatgctcgctcatgcgccactcacctccccaagtgtggcccagttcctaacaggccacggagcagcaccagtaccaaggactggggaccctgtactaaatgatcttgatcttgttgggatgcacttccggcctgcctatctgtagaaatgccatcctgtcccttatcttttttattataatcacttttgggaaggttgaactcagtatttttctgttgctcattttatgtataagtttccttgaatttctaggaggcggcttggttcagggtagctgttctaacttctcagaggttctcacacagcaggtaaaaacgctgcaaccagcctgcacagatgcacacactccagccgctgtccccactgtcatcaggaccttctcctgccttcctctgttgccaaggacaggggccctgctcgattctgattcctcacatgaggttctgccctgcacagcactttacctggttgcttagagagctgcagggcctgagctgccccagccccttttgggccttcccaccagcctctctccccactaccctggtttggacaaaacagctcctacttcagctgctggtcctaaagtgaccccgactcccctgcccagctttgcagtgaagacctgcaggctgtctgtggctctcctctgcttccctcctcccagtcagatgctaacaccacacaggcctcggtggtttatcctcatccagctgtattttgcaactcatggggataacttaggacctagtaactttgcaactgtgatccagggaacttgagttttgctacctggttgccgtgtttttatgcagggatacaggagattcaagggccacgctgtggctgctctgccatcacccaacactcagaactgtcatctggccgggcacggtggctcacactcgtagtcccaactacttaggaggccaaagcaggaggttaacttgagctcaggaaattgagaccagcctgggaaacatagtgagaccccgtctctaaaaaaataaaaaaaataaaaaaataaaaaaaataaaaaaactagctgggtgtggtggcgtgtgcctggagtcccagctactcaggaggctgaggtggaaggacagcttgagcccagggggtcaaggctgcagtgagcagagatggcaccactgcactccagcctgggcaacagagcaagaccctgtc[134 bp omitted]aaaactacaaaaattagccgggcatggtggcgggtgcctgtaatcccagctactcaggaggctgaggcaggagaatcgcttgaacccgggaggcagaggttgcagtgagccgagatcgtgccgttgcactccagcctgggcaacagagtgagactccgtctcagaaaataaataaataaataaaaataaaacaaaataaaataaagagagatgagggtgcactgaaacatggagcccgtgctcacccgagggcagccagaactccagctgtaagacaccggctgaagctttcctgttggcaccgctccctcctcagaagcggaatgtctttatttcgttatctgaacagctctgaggctgcctgagctgtcgctgcccggtcccacacccctcaccctctcaacatcgggaactccatctggggtcatcaggagaaaaggccccaggaggcaggttaggaagcgccagtcagcctagagccatgggtctcaccctcctgagatcttcaggagccccggcctcagcctgcaggaggctgcatgccacccaccagcccccagctccacggcccaggcaggtgtctcggcccttttttcccagcacccagacctcatggggttttgtgcaaatccaacaaggtaaccacctaagggggctgcactgactgcaggcacacaggacgtgattatgaagtgccggccattattcctaccagtattagctcagaggatctgaacacacctcccagaaatactcaaatacagaaaaaaatcacaaaatttctaaggtttcaaaaacgccccaggtcaatctatctaaccagaaagaacactggctttgtggcttttccaatctcacatgcagttcttcaccgtgctacacgtgggaaacgccgtgctgtgaacttcacgcccaccacaggccacgcctcgcgtctccactgcgggcctcagcccggcaggcagtaggatggactgcgtggacggcggccagcatgtaaatgaaacggaatggaggcaggaggaggaaacacccgcacgtgctgctagcacaggaagaactgttctgtggaacttttattttggtctcctataaaatccgtacgtttctttttatctggctgtgttcctgcgtgcaggcacggcgcgagggatcaactacccccggccctgacggcaaaggcgctgcagagccagtttactaaaatgaaggaagccgagaccccagggacaaagccacctggcccaggggacacacagcaccctgctgtgccacgtctctcaggggccttctggtcatcagcaggggcaaccctactggagtgacctccagtaagagatggggtggggaggttcaaacctttggaatttcgggaggcttgggggagaagaggcatggagacttttgttcagacaacctcatgctgaagcccggcctgctaagcccagcaagggcacccccggtcagcacccgaggccccacccccgacccaggtctccagggacactgaggcaaagccatgggcctgggtgaaggagcctggggcccatacagctccatggaaggaacatgtgccaggggttcctggcacgctgctctccccacaacagccacagaaagctttccaaccacccaagcctccctggggacacctctgaacaggggacatggccgggagctacccacagtccaactcctttcctcttcacaagaaggtcccaagtgtgggctgcctgggattcctctggatcgtggggacccacctgccctggccagtgaggcctgcctgggagcttcagaacccattctcctctcacactcctcagaaggagaggcccaaagacaggcaaccccatgctgcagggtgatgccacccaggtaatacggccgcagggtgatacggccgcagggtgattacggccgcaaggtgatgccgcccgggtgattacggccgcagggtgatacagccgcagggtgatgccaccagggtgatatggccgccgggtgatggagcctaggtgatacggccaccaggtgattacggccgcagggtgatgccgcccgggtgattacggccgcagggtgatacagccgcagggtgatgccaccagggtgatatggccgccgggtgatggagcctaggtgatacggccaccaggtgattacggccgcagggtgatgccgccagggtgatacggccgctgggtgatggagcctaggtgatatggccaccgggtgattacggccgcagggtgatgctgcccgggtgattacggccgcagggtgatacggccgcagggtgatatggccacccgggtgatacggccgcagggtgatggagcctaggtgataaggcggcaccagagagaagtggcacagcaggacactgccggagcttcctggggacccaccacctggggctgaggcactgcctcggtgtggccaggacgtcacagcaaggggcccagagacaagcggctctcaggagagaggccaccctggatctgtcccgcctgcaggccagctgcccgagaacatatcaagtccttctgggctaggccactgctgtccgggttccctgtaatcagcagctgagagcgtccccactgcccagtggcttcccagggccctcgagccacactgccacatcccctgcagggcagcccaaagccccttcctccgtgaacgaagccttgcctggcccccaagacgggaccctctggttgaacagtctgcaccctgagcgacctggtgccccagggagtgatctccaggaagctgaaggacaggcacgcaggggaggggacatggggacatttctgctgagacagcatttcatggagcagagagctggcggaaggggacagaaagggggagtcacaccaggtgcggtggctcatgcctgtaatcccaacactgggaggccgaggcgggcagatcacctgaggtcaggagttcaagaccatcctggccaacacggtgaaacccagtctctaccaaaaatacaaaaatcagccaggcatggtggcgggtgcctgtaatcccagctatttgggaggctgaggcaggagaatcgcttgaacctgggaggtggaagttgcagtgagccgagatcgtaccactgcactccagcctgggagacagagtgaggctccgtctcaaaaaaaaaaaaaaagaaaagagagagagagaaaggacgagtcacacaacaccctctggggaagaaaactgcagcagggccacgcaggctgggggccgtgtcaggggtccaagaccagctgggaggcagacggggagacagtgtgtagggctgggaggctggacaggcggcggattctcgctcccgtcaagccaggacaccttcacagggttctgagcacggcgccgggatctcgcctcctccccaagaggctcaggaggggacaaggatagggacagaggtcgcaggaaggccagtgcgccgtgactgtgtgtaaggccacagggctggggccgtggtgggaagaagcgaccatactcgggatgtattcccagagcaggtgccgggacacacggaagtcaggagctgaggaagggtccggggtgagggcccgctggtccacggcatctaccccaaggcctctctgtgctgagtgcctgcagcctggctcgggtggcaccctccctctttggcactccaaccagcatctcctgcctccaacacaggacatagacaccctgccccatgacccagcactgcagggctggggttggcaagtgctcaggctgacacctcctgctgctggttctctctgcctccttctcaaccttccctaggccactgctcacatgcaggatggtgaaagttgcctcctccctgtctgaggaccccacaaggtaggctgagggcctggacgctaattccgcagaagaggctggggccaggtgggctgcgagccctgctggttcccttttctctgcctggcgggcatgctcccctgcccctccagggtatgctcctctccagatgcctgccccatgggcccccatatccctcagcaataggctagaggaaaagggaccacacacgccatggccaggccaacacccgccaccccacccccacctacgatgtctgtcactgtcacataggagggacgcacataagcgggaccccacatgctatggccaggctaacccccgccactccacccccacctacgatgtctgtcactgtcacacaggaggaatgcacgtaagcgggaccccacatgctatggccaggccaacccccgccactccacccccacctacgatgtctgtcactgtcacataggagggacgcatgtaggcgggactccatacgccatggccaggccaacccccaccactccacccccacgaacgatgtctgtcactgtcacataggagggacgcacgtaggcgggactccacacgccatggccaggccaacccccgccactccacccccacctacgaagtctgtcactgtcacataggagggacgcacgtaagtgggaccccacatgctatggccaggccaacccccgcctacgatgtctgtcactgtcacataggagggacgcatgtaggcgggactccacacgccatggccaggccaacccccgccactccacccccacctacgatgtctgtcactgtcacataggggggacgcatgtaggcgggaccccacacgggagttacgcgaacgccggacaccagagcagcttgggagcgtgcgcagcccatctttgacagccgagcaagggcgtcacgcaggggtgatgctccagaggcggcgccaagcgcaggccctccccggagccagctgcctggtgggggacaggactcccacagacgcagggccagggctgggcagggcagcgggctggacaaggggacctgacacctaccttctacaaagagagtgagtgtatgagtgacttgtaaaattaaagatgaacttactcaaagacaagcattttggagacaacgaagtattttaaaaaggaccgggtgctagattagatgaagttcctgaaaaatgacattttgttagatgagatcagcttcctgtagggctttttctttttttcaaggagtccttacatgttggagaatttacagacaaaatgatgtgatggatattttctctaaaacgctgtggaaagagaaccacagtgggcagaaagggaccagcagtgccgcgaatcgctggcgcaggaagagggattcatcacactgcgtccacacacttgagatttccacagaattaattttcgaaaaggttcgaaggccaaggatgtatgcgagggagaaggcaggggcagccctcgagggctgtggcggtgcgggatggcaaccacccactgagacgcggggcagcctggggccggggtgtgggccccctgggcatgcggtcctggcaacgcactcaaaacccccatcatagtttctaccccgggaccaaggctgccacagccccgcccacagggagcttctgttcatgctccatccacagatctcagaaatcactcaaaaaggggctgaggtgctttacaaaatcgatcccaaacttcaccccggtctttgtatgggacgactcagctatgccagcctgagctggcaagctctgccggcctttctgcatcaagtgtgcccacgcatttccgtgtggactgtggctgcgtggtatctgtgaggcccgcagcctgcaagatgaacagtatttcctctctggctctctgcagaaaaggtctgctgagccccggccagcgtggggccagcgtgggcctgggacctggggcctgacatgcagacacagcaaggagagaagctgccgcaccttattcctcaggtctgaggcagggaggcggcctccgtggaggggagggaggccatgaggtgtcaggggccacagtgaggtcaccatggggccttcgcaagcaaacctgggccccacgtagcccacaaatgagttttgctcaaccccaataatgctttattaaacaaacaaaacacattgccaatgtccaaaaagtgaaggatttcacataaaaacccaaactgacaactttccctgaaaagtctgcgtcagcctgcgggttccctgcactcctgagctttccctgaaaagtcggcatcagcctgcgggttccctgcgctcctgggccacccctggtgtaaggagtttcctgccagggagggccacaggcccgcctggaatcatagcagagggtccaggatgtggaggcggggctgtggggagaggaagggggcaccctcaacagacgggggtgctgcccaggctggaggggcaaggacagaggaagtcaggcagagaaggtggcccccaggggtccccaagatcatccagcagaaaggaaacttggagccacaacactagccctccctctacagccaggagtgcaaggcccagggcgggaggggaggccagggtcgggtggtcccagggccccaagaggggaaaacagggaaggggggtttcctcccacccagaggcaaaggaagccagggtcaggtgggaggcagcggggtcggctgggaaggcctctggctgctcacctgggttctcgtgactggccatctgctggtcctcagaatccagcggccccggagaccaggcttcttcccgcagctccatgtctgggtccctgttagaaggggatgagacagaaggacagagtttatggggtgccaggctgcaccgagggccctgcagggaggcagcctgcagaccccggcgtgacaggcacagcgcccggcagacaaggcacacagcacctaccccaggacaccgagaactggcctggagctagcctggccgctccccactgcaggggccagccaaggcctcacacagccgcaggaaggactcaaggaccctcaagggctacaaccaccgccagttcccatcccagccccaccactccccagctggacctggggcaagcaaccccacctcgcgcctcctcgcgcctcagcttcctcactggcaagatggagaacatgttactgtcaagcgtacacaagacagtgtacatgtggtgctcatgccaaacagggactggagttcccacacccctggcagatacttacccatcacagcagaaacagggcaacaggcgcctaagggtctctgcacacgacactcccaacccgtgccacacaccgtgagggtctctgcgcacgacaccaccgacccgtgccacgcaccaggagggtctctacgcacgacaccaccgacccgtgccacgcaccgggagggtctctacgcacgacaccgccgacccgtgccacgcaccgggagggtccctacgcacgccgccgacccgtgccacgcaccgggagggtccctacgcacgccgccgacccgtgccacgcaccgggagggtccctacgcacgacaccgccgacccgtgccacgcaccgggagggtccctacgcacgacaccgccgacccgtgccacgcaccgggagggtccctacgcacgacaccgccgacccgtgccacgcaccgggagggtccctacgcacgacaccgccgacccgtgccacgcaccgggagggtccctacgcacgccgccgacccgtgccacgcaccgggagggtccctacgcacgacaccgccgacccgtgccacgcaccgggagggtccctacgcacgacaccgccgacccgtgccacgcaccgggagggtccctacgcacgccgccgacccgtgccacgcaccgggagggtccctacgcacgccgccgacccgtgccacgcaccgggagggtccctacgcacgccgccgacccgtgccacgcaccgggagggtccctacgcacgccgccgacccgtgccacgcaccgggagggtccctacgcacgccgccgacccgtgccacgcaccgggagggtccctacgcacgccgacccgtgccacgcacagtgagggtctctacacacgccactgatccgtgccacgcaccaggaaggtctctacgcacaccacccacccgtgccacgtaccatgagggtctctacacatgacaccaccaaaccgtgccatgcaccaagaggatctctacacacaccaccaacccgtgactgtgaaagtctctacgcacaccaacaccaacctgtgccatgcactgtgagggttctctacgcacaccaccaagcggtgccacgcacacacacagctaaagtggagagcagagcctttgccacgcgcccgagttgttgaagggttcatacccagatctctcttttaaaacaggctccctggctggatgcggtggctcccacctgtaatcccagcactttgagaggccaaagcaggtggatcagtggaggtctggagttcgagaccagcctggccagcatggcgaaaccccatctctaccaaaacacaaaaattagccaggcctggtggcaggggcctgtaatcccagctactcaggaggctaaggcaggagaattgctgaaacccaggaggcagaggttgcagtgaggagagatcacactccagcctgggcgacagagcaagactctgtctcaaaaattaaatttaaaataaaataaaataaataaataataaaaaaataaaatgaaacaggctctgaggcagccctcccagcccttctcccaccctcctgcaggcgcggctggaacctgaaccctcgcacagatcagggaagggcagggccgccaggtggagctgtggcaaacgtgccctcccagctttccacatgctggggtttcataaaccaggagcgcctcagcgaaactccacggggaggacacagggctgccaacttcgacagccgaataagggcaatttaaaaaaacgtcctgccggcctgagtgcagcggtgtttacaactaactgccagttacggatctctttgttccttctccatgccaactgcttcacttgactagccttagaacaaaaaaacctcctacctcccacggtagagatttggggcttggctccccgaatcccccggcacctgcaggaggcaggggctgtaaccacccagcttctcgggggaagcctccagcaggagccacgagaaacctgcccgaggaggcacagcctcccactgccgggccagggctccagggctcacaccccagggcccacacttctttattaaaacagcttcattaagatgtgatcccctcaccacaacattcccccatgtaaagtgtacgatgcaatgatatttagtgtattcagttttgcgaccctcaccacaatcaactttacaacaactccaaaaagcccgcgcgcccacggcagtcaccgcgcattcccccggccgcgcccacggcagtcaccgcgcattccgccctccgcgcccacggcagtcaccgcgcattcccccctccgcgcccacggcagtcaccgcgcattcccccctccgcgcccacggcagtcaccgcgcattccgcattcccccctccgcgcccacggcagtcaccgcgcattccgccctccgcgcccacggcagtcaccgcgcattcccccttccgcgcccacggcagtcaccgcgcattcccccgccgcgccctgcagcctctgaactcctttccgtccctctggacttgctgccgtgtgctctgcacaggagagggacagcatctgttcctgcgtgtctgactcttccacacagcatggtgctgcggcgtgccagcgtgtcgctcctctctcgggctgaaccccactccactgtacggcggccacagtggtccatgcacccacccatcgctggaggacaactgtgagctgcttccacagcgggcattgtgtatactccagcttcaacgccgcgtccatccatttatttctgtggacgttcgcgttcatctctctgggaaggagaagcctgcgcaggccccagcccgcccgcgagtcttcaattctgtgtcttatcagagttgcctactgaggtggaggcgggcacaaccctcgaccaaccattagcaaagcccatgctccggccgtctggccccagttcctggtgtgacctcacccccaggtgggtaggactcctggtgagacacagcggcgccaccccacctcgttccccaacaacctcaacaccggaagagaaaacccaggcgaggcccccttgggctgaatgcactcggctctgaggaaacctccggcatccagcacctcattccaggccggggtctgcagaccagcacgtgggaacggcggcatccagcacctcattccaggcggaagtctgcagaccagcacgcggaacagtggggcttccacctgagcaccacacacctccttggcacaacccctctgaaccgattttcccgagtccctccagtgacaagaagctcaccactatccaggtacagaacggagccagccccactgcagggtgctgtcaacctgccctcacgaagggcctgagagtctgaggagaactcgggacgtgcctgtttaaataaattcatgtgcacagatatgccatgtgggtcactgggcagcccctggccaccccaccccacggttccaggcactgctctaaacggctgacgaactgtgagtagattggggtccatgatagccctctgggtaggtctgactgctgtccccattatgcagatgaggaaacagaggcccaaggtctctccgtggggaaggggagaagggaaaggctggaggagtacagaaacagttcacacacagaccatcaggccccaagtctatgcccagtaccacccaccactacgctcgcctcagaaactgtgttcaaatcccacgtgggaacatgaaggccgcgctctccagggtcctcatttactgagcacctgcgaggaccagcagacatggggtcaccagaagacataagggtcactgggagaaacgagggtcaccgggagacacggggtcaccgggagacacggggtcactgtgagacaatggggtcactgggagaaacgagtcaccaggagacacggggtcacagggagggacaagggtcaccaggagaaagagggtcaccaggagggccgaggtcctgcccccaaggctcacagacagcaggaaggaagcacacggggaggggggcctaggggcagaaaagggaggggggtctagggggagaaagtgacgggcagctctgttggggaggctggggtgggccctcagaaagaaggcaccacaggagcattccctggatgggcagcgtggaggggaggggacaggcagcagcttgaaggccgggcatgctgggggctgcgggagaggccgctcgaaggccgggcatgctgggggctgcggaagagagagcttgaaggccgggcatgctgggggctgcgggaggggctgcaggtgtgtggggcagtacctgccgggaggactgcgagtcacctgaagcgcaggggacccttagaggtgggcactgttctgacgcttgtcttatggatgtggaacatgaggccggcagggcgagaccctcgggtcccctgcaacacgtgaagggcagcactggcggcagcagccaggagcagtgtctgtgccaggcacagagccacagagactcccaggagactctctcagctccagaagcgggaggcactgaaggcagccctgccaggaggcgccgctccccgctctctccacccagcccctgcccagtgctccctccacctcgcccctgcccagcactccctggctccctccaccccgcccctgcccagaactcccagctcccaccacccagcccctgcccagagctccccggctccctccaccccgcccctgcccagcactccctggctccctccacccaacccctgcccagagctccccagctccctccaccctgcccctgcccagagctctcctccagtcctcccagctgcctcctctggactccaggtgagggccacctcctcagggtccccacttgctccacctgcctgcctttctcttcctaacgcctgctactctgccactctccgtgtctctgcttagctggcctgtcctcccggcaccctgtcatgtcagggcccgctctgacacccatgtggtccctagcacccagggcagcgccaggcacagctgggtgagcacacaaacaggtaggtctggacaaagcacaggcttaagaccagacacagcaaatcccaacactcagcccctcgccggacctgtctcaggaagaggtgagacccacgcggaaggacaggcagacctcccctcggacagacccccgtgggctctgggtgcctcggatggaagagttcaggctaaactgccatgaacatgcttgcagcccgaccaggctagctctacctctccagaggctaccgacaggaaagcccaaatctcaggaaatgcttcttgcagagacagcctccatcacagtgaggttccgaatggggaaaccgggaggaactcaagagacccacgccggggaggtgggtggagtcacccctcctccacgggagcaagggagccggccaaggaatgacggctggcacccctcccacgcccaacatcaagagtgagagtgatctcaacgtttttcttatgttcattttcctaatattttaataacaggtaattacgtctgtattaagggaaaaagcctaaaggggtgtcttggacagcggctggggctacgtatcggaactggtagatggctgggtgctgggggccagcagtgaaggcgacggcacagaacaggccaccccagtgcagccccaaaggcacgggggcagcagcagatgcgagaagggtgctctagcctcccctttcttcctgcaagcagatgaaaccccacgtgaaacacgccctcctcgtagaggaagaggacgtgctcatcaccagcaccgggagctgaggctgagagacagctgcacacaccaacccttatctccctcagcctccccaaggattttagttactttttcacagttgctattcttgggcatagaagccctcaggtctaactgcttcaggaggccttcactttctgaagtctcccatgtacctgtaaaaataacatttgtggccgtgcgcagcggctcacacctgtaatcccagcacactgggaggccgaggcgggtggatcacgagatcgagaccatcctggctaacacagtgaaaccccatctctactaaaaatacaaaaattagccgggagtggtggcgggcgcctgtagtcccagctactcgggaggctgaggcaggagaatggcgtgaacccgggaggcggagcttgcagtgagccgagatcacgccactgcactccagcctgggcgacaaagtgagactccgtctcaaaaaaataaaataacattcgtaagcttttctcctgttattctatgtcaacctaattctcagactctgccagagacccaaggagggaagccactgcacgcagcctaatgttcaggaattacatagtggtgatgattacacaactttgtgaatatattaaaaaccagtgaattgtacattttaaaaaagcaaatgttggccgggcacggtggctcacgcctgtaatcccaacactttgggaggccaaggcaggcggatcacgaggtcagaaattcaagaccagcccggccaatatggtgaaatcttgtctctactaataatacaaaacttagccaggcatggtggctcgtgcctgtagtcccagctactggggacgctgaggcaggagaatcgcttgaaccccggaggcagaggttgcagtgagctgagatcacacgccactgcactccagcctgggcaacagagcgagactccgtctcaaaaaaaaaaaaagaaagaaaaagaaaaacgaaatgttgtaatacattaattgcacctctattagaaagtaaacaaacttttaaaaattgtacaggctttctaattacaacaccctagacattaaaaatgcgtaagactcagcactgtaggaaaggttaaaaaaaaaaaaagcacaggaaaaaaagggaagagagcagtttgcaacttggggctgaggaggtggtgggggctgctcctcacctcctcttcttggctgaaacctgtttgccaagtggtgataatgtacttccagtgaaactctatcacataactcaataaaagcagggacttcccagctcagagccttcccctggcctccacctccggccagcttcctgcagggtgaaggccttgaccaggctatggatgggggaggcgggagagtccaccctccacacccctcctctccaccgcacagcagcctgcccagaggccagcagagatcacctctcactcagcagggatctgccgcgagccaggaggcctgcactgcccagctaggcacaaggcatgattcctgctgtggttatagctgggtaggggggtagtgaggcagcctatagaggtggaggggctgaccccgggcggggagcgctgggcctcaaactgccccccagatactaataccttttacatgttttcaatagacagccatatacctacatgaaaagtagccttgatttcccctcttgttcctaaagcctaaaatgtttactatgtggcccactgcagagagtctgctgaccctgatgtaaataaaggaatgagggtgccggcgtttggggtgcacactttccaggccacagccaggccaaggaggcacagcagaggggctgagcacctggaatggcgccaggagggaggggcaggcagggacctggggcaaggcctgggcagctgggagggaggcccagcctggggctccgtgctcagcagctgctgccctggaattcctggtcacttcacctttgacccatattttgtaagtggggtccaagggcacaagggcttggtgctgggggctcctagcctgggcttgggggtctctgcacccacccgtgggtgaaatgccaaacacaaaacaccctggccgacccagagacctccaggaaaggaagatgcttttttcctgccttttagcataagggtccacaaattccatagccagaggggccgggggcagcagaggaggggtaaggggtgaggggccagagctcagggtctggtcgctcttctaagagggaggcgggaaggaactccgcaccgtggcgacctgggacagggcccacactgctctgcatcccaacttcctctccgagaagagggaggggccgacacctaccagggagatgtgaaacaaccagcctgggtgacagcactgtgcccctgtgagcaacgggcagccgcggtaccagtccttggcgtcatcaccggctctgccacccgcggaaatggctgagcctcagctgcctcctctgcaaagcagggacgggaagggcaggtgccttgctgagctgtgtggggactgagtggaggcttctgaggactcaccagggttaagacgggtgttcattcaatgctccccagttctcttcttctcccgtccctccaggcatgctctcagcccctgctgaagcctgtgtcctaatccatcaggccctacccccaggacctcatggcgggggcatgggaccctcacccgcagaggtgaacgatgggagaggcgggggcaccaggagctgcgggggcctgaggcagctcctgacccagctctcagggtccaggccagctccctaggagaaggccccccacttgctctcaagaaaaccctgggctattcaaggaatctaccagaaagctgggaattgcacatcttctgaaacgagggtcccggcctcccttaccagcctccgtttctcagtcggggtctcaggctctcccagcctctgcaggtgcttactcacctggctctgacctccgctgcagagaggaagcacctggagcacgggcaggggtgcgttcccctcgccccagcccttgagagatccaattagcacaaatgattgttattattgttgttattaagtcccgcccacccctctggaggcctgcctgccaattatcccctttcttctgctgccaatctcacctcctcctccccccgcactctcggaagcaactcctcctggccctccgtggccctccctgcccagaaacttctctggcacccacctgctttcttcctccccccagtctcttattccttcccctctacttgcagcctggagcagccacctcccttccttccccccaagtcatcctccaaccactgggctaacaccctctctgacttttcaccaaatcctgtggctccttctcagcctgactccacaacctctttggagccaccatgcaccccatgtggccctgcctttgtggggcgggggaggagctctggggtgcccagaccagccgttccccccaccccaccccctccagcacggagggctctggccctttcctccctcccaccctcactctcttctccccattccccttcccttggggctttcgctccctcccaccacgatcctggctcccaccctgcctcttggaagtgccctcctcacaccacacaccaactcatcttcctgaagtcactcagttcaaacaacccaattagaacccgggcaaaggatccgagaaagcattcctccaaagaaagacaaatatctgataggcacatgcaaggatgtcctcatgagccgtctgggagaggcagaccaaacccacagggaggcagcacctcacacccactgccagcctcagaaaacaagtgctggtgaggaccaggagaagtggggagacccccattgctggtgcgggcgccataggaaacacctggcagttagttcctcaaaaggttaagcccagaactcccataagaacccgcaattccactccttagtatagacccgagagaaaacatgcgtccgtccacgcaaaaatctgcacacgaatgttcacagaagcatcaggcataacagccgaaatgtagagacaacccaaatgtccatatggatgaactaactgtggtccatccatgaccgtaatggaacacgaccataaccaggtgtgaagttcagctgtgacagggatgaccctcgaacacggcacgcttggtaaaacaagcccgatgcagaacagcacgattctatttatgcgcctgcccacaagaggcacaccccgggaaagaaagcagatcagcacttcccaggaaccgggacgcagggaggcagggaggcagggagggagggactgctgaagatgcacggcgtttcttttgggatgaagaacaggttctaaaatcgactgtggtgatggctgcgtaaatcagtgaatacactaaaaaccttactgaactgtatattatttatttatttattgaaacagagtctcgctttctcgcccaggctggagggcaatcgcaccatctcggctcactgcaaccttcgcctcccgggttcaagggattctcctgcctctgcctcccgagtagctgggactacaagcgctgaactgtgtactttaaaagggcaaattgtacactatgggaatcatatcataataaaactgttctcaacaaaaagcaactcagttcatcacctccttgcccaaactgctgccactgcacgtgccggctgcccctcaatccaaaatccaagttcctccccaggcaccacagggttccatctggctccggcacctctgcaaaccccctcccttccagctggcccggatctcgctgtgcagtgcactgctcctgatgcaccgacaggctcagtcctggccaggcccggtctttcacccttaaggaccggccccactcctccacttgccccggccaggcctggtctttctctctgaggggccgggctcagtcctccacttgccccggccaggcctggtctctctctctgaggggccgggctcagtcctccacctgccctggccaggcctggtctctctgaggggccgggctcagtcctccacttgccccggccaggcctggtctttctctctgaggggccgggctcattcctccacctgccccggccaggcctggtctctctctctgaggggccgggctcagtcctccacctgcctggctcagtctcacctttcaagggtctactcaaatgtcagcttctccctgaggcccacaccccacctttcccatggcagggctgacttcctggctggtcagcaccttctgtcaccatgtcacgagcgtggtgatatcacttctattggtatttccttcctgggactctgcatctgctcctgggcacaatgctccctgagggcaggtgccaggggtgtccagcacctgctgccctggtacccatggctgcttccggaaccaacactgctgcccggccccgccgcagagccctctcctgctcaccttcccgctctgctcccagctcaagaagcccacagcgccacccctccactcccccaccagctctttcactgcccttttctgtggccacttcgctccctcactcctggcctgaaaacctcattcttgttccctcctgcacctccgcctggatctgcaggctaggtggggtgacatctacctggcatcttgcatggggccctcatttcctcagccccgggacatctctgtgacaccacggagatcccaggcctgccctccctgagggtggtggggaaagctctacacaccctttcctgttcattctacagtgactggtctgcgtagaccttccctctcgtctgagccggttttggcagatcacattctcctagagcacagcctgcacgtccctctggcggggttcaggacgcagagggaagccgttgtcccgtgctctggcccctctccctctctagaggccggccgcggca[137 bp omitted]gcctcccgagtagctgggactacaggcgcccaccaccacgcccggctaactttttgtattttcagtagagacggggattcaccatgttagccaggatggtcgctgctctattcttttccagccacttcacacctggactcgcgcagcagcctcccaaaggtttcccgcatgcctcccacccgcaccacccacaccctccccgtcagagccgtcttcctcgggggcatcagcacagcgacggcagagacagctcacggccccagccaccacactcaactactttccgagagggcgagagagagggacttcatctactgtcagggtgcagtgtgttgtggagacagcggggcacagcccgcaggacttggtgcctgcagatcttcagatccttatgcgaaggcttccgggtcttagggcagccgagtaactgagaattgtttaaaagacaaaacagtcttgaggccaaaagccccacacacctacaaagtacactatggactctgggtgatcatcaggtgtccgtgtaggttcatacattgtcacaaaacgcgctgccctggagtgggagttgacagtgcgggggctgtgtcgggggagggtgcaggcggatatgggaaatctgtgcatcttcctctcaattttgttgcgaacctaaaactgctctaaaaaaaaataaagcccctggctgggcgcggtggctcacacctgtaatcccagcactctgggaggccgaggtgggcggatcacagggtcaggagatcgagaccatcctggctaacacggtgaaaccccatctctactaaaaaatacaaaaaattagccaggcatggtggcgggcgcctgtagtcccagctaccggggaggctgaggcaggagaatggcataaacccaggaggcggagcttgcagtgagccaagatcacgccactgcactccagcctgggcgacggagtgagattctgtctcaaaataaataaataaataaataaagcccctggtcaccactcaggtggctgaggaggcaggatcaattaagcccaggagtttgagaccagcctgggcaacacagcaaaatcctatctcttaaaatatatacatatatgaaataaaacactaaaaataaagcctttatattaaaaaaaaagacacacacacacacaaaaccacacctgcggaccaccttacattctgtgacccctctgctgggccaacagggcaggctggccattttccagatggtgtggattctcccccggggcctttgcacagtcccttcctcccacctcacctgccctctcagtatacatctgcttagcccatctgccacggctcagcatcaacagcacctcccccaggaagctttcccagactgctcccttccctcagctctatcctctcttatccagcgacaaaagatcacactcatcaagcacggattaaatcccaggtcctgggtgcagggtgccctaagcacataagctctgatcctgggccccacaatcagtgggagacagtgcgaggccatgaggccagcacagggacaagaggacagccgttctgggcagggcagggtgggatctggccccccaggaaccagccacatgacctgggcaaggtgcttgggctacccgtccctcctgattaaatgagatgtgtgtcaagtgctcacccaaaagccgtggagatgcccagtaaacacagcctatcactgtggtccttgttgtatagacaaggaaactgaggcttccacaagcagagtggctagtacagtatcacagagccacagcgaggctttcaaaagcggagtggctagtacaatctcacagagccacagcgaggcttccacaagcagagtggctagtacaacctcacagagccacagcgaggcttccacaagcggagtggctagtacaacctcacagagccacagcgaggcttccacaagcggagtggctagtacaatctcacacagccacagcgaggcttccacaagcggagtggctagtacaatctcacacagccacagcgaggcttccactagcggagtggctggagcaatgtcacagagccacaacgtaggaggctggagccacacctgagtcggccagctgccaaagacagcttgcttccttctaactcttggacaacggcatttgtcccctttaacgtccaccattgaggatggtcctgtgtcccgcagggggatctgtgtcttactccgtgtcttattcacctctgcgacacctactataggtccccatcagtcccacagtgcatccagcagactgtgcacttgagggcggggctatttccagcaaagaccctgcacacagcagcctcaggaatccatggctctgactggctggaccctgggctgaggcaaggaccacttctgatgcatctctgggtcccaacactatccactgcaaggcctcgaaacaggggggccagatgggacccccatttagcacaagagagacgtccacactctgtgagcccaaagggagaaggctcaggccacggcagagacggaaccaggaaaacgtcacgaaaaacagcctcaagttgccaggtcccttgcaggaacagacaggcctggggccgccccacctgggctcagagcttgggctggtttctctgcagctgtaaggtgacagctctgggctcctgggacagggccactgacactggaggtgtgactgctcgaactccacacctgccttgctctccctgatgctgggtgagtgaggcctccttgggggttgcatggatctcagcactcaacttccgagccacttgtgcttctcccactatgctggggttcccctgaaccagccagcagccctgcgtgtaggagtcctcgtggacagtacaccccactaggcagggagtccagcgtctccaagccaatgactaacacctagaggacttcggaacagcctttgtccccctagaccccaacctgggggcggaagggggcggttgtgatggtcaagggtctgggctctggaatcgcagtagacacaggttctgaagctgctgggggccttgggctaacaagtgccatccagagcctccatcccatacccctaaaatggaggtgaccacctccatcccagagccttgagaatttaggacagtgaggaccaggcactgggccaggttcctgcaaagtgtgcaccagcaagtgttgtcgaatctgcagtttctcacaccacagaggccccagcacctggcacagtcctcactaggctggaggcctcaggatgcaccagaggacacacgaacgaggtttggaaaggcctgtgaaacatgtctgaggatgggtgtcctgagagctgtgtatgcctagtaacaaaagacctcccagggcagccaggcagttgctggtggccttgagctgtgacccctgccattccctgcccagagcccactgtcatcctcccttaagtaccaggttcctggtagccaatccttcctctctatctttcaagacacaatacctcccctgcaccacacacccctccctcaaggtcagagctcccgggagcactctggcaaatctccccacccctctgcccagtgtgaatgggtctcagctgctctgggacagggactgtatgattcctgccaggctgcccagcacggagcaccactctaccttgtgcttgcacagaagggccttgagatccctctcttcacccaggctgggccaggcacctcatctgggccctcacaggacagtgctgtgccaagaccatgtgtgacctcatgcccagcacagggcctggcctgtgcagccgcctggatggattacatttactcagggaattgtgaacttgctctcgtttttagacaactgaagggaaattgaacctgggaaaagggaagtgacatgtccaaggtcacagaagtggaagagacagtgccaaggccaaggcccaggaaagggcctggctccagagccctttccatttactttacacccatctgttgaggtctgctctggctctaaaatgaaagcattaagagccttcccgctgaggtcaatactattattaccactcccactctgtcctggtggaaagtaaggcactgaagttactcgtctaaggccacgaaggtgagtggtggggctgggacttgaacccaggcctgcccagtcccagagctcttggggaatacaacccagtgcctgcacacactctggcagtgcaccagggaggggccaggccgggtgcccggatggatggataagacatgagataagcaagcaggaatctgatctggatgttctctgaggccgtgcgtggccggaggaccacagggactgcgcagaggcaggcaggtgaatgtcagcagcgtttagccaaagaggcttacggtcttcagaggagctaagccaggatcaacgcaactgtgcttcccggcgctggggtcaatcggatccccagatgggttctaagcactgcgcaacatgggacctgggagcaggacaccgcaaagagcagaccaagccattccttccctaaagccctgaccatcccccggactgggctgggtcaaaatgccttccctggctcccacagcccccagacctctccatcaggggtctggtcaccttggatggcgactctgtcgcccgggtctcagtctctgccttccacccagactccaagcccttgttcatctccctgctccctgtctctagtgcccggcacagggcctggcactggaaaaacttctgcctccactcactcctgccttctgtgtctgtgggtcacttttctgtgcgactctgcaggtcccagagcactcatccacatgaattggggtcagctccctggactgggggtcggggtggggtgtcaggagggcggggctccactctgatccactcggcacaggggagggaggcctcaggagtcgccacccgatccagtccccgccttcgccctgccccgtgggccacgcggtggctgaccttggcccagtcacttcccccgctggggacgcgcttcctccccgcctgccgagcaaggacgaatgaatgggcctcctgccggccagaatccccgtaattacccgcctgatcaaaggccacgcgcagcccgcccggggcagcaacgggacccgggctgactcgaaaaggggaaggaagggctgggggggccgagggctgagaccgtgccctcggggccgcggtatccggccaggccagcccaaccgcgcggccccttcccccacctgggcctcaacttccccccgaagtcgccaccacttccggccacgaccggcggagttggaacttcggggggacggacagcggccccacccccgacggcccgcagcagagggacccccaccgaggcccccgctcctgcccccgccacgcgcacgcgcgcgccctggacccggacccgcgcacgcgcaccccccctccagccccgctcgccgcccgcgggccgcccgggcgcgcgtcccctcccacagctcttcggcgcgcacgcgcactccccccgcccgcgtcaccccggccgcgcgcccactcacgcccccccagcagcgcgcacgcgcgcccgccgcccagtcgcgctcgccctccagtctccccacccacccccagcccaagcccagcttcccgaagcgcgcgcccacctggcccccagcgcacggcccccgcccccacccctcacctccttggtcccggggccgccgcgccgcactcctcctcctctctcctgcctcgcggatggtggcagcggcggcagcggcgactcagaccctggggtcagggggacgggcgcccaggccggaagtgaccttcccggccgcttccgcccgcgccgctcccccccttctccctactccctgccccccgggccgccaccctgtcctcgccgctctaggaaggcgagcccgctatcccggccaccgcccccagctctgtggtgcccggcgggcgcctgagggagccacttccggaagtgtctaggacgcaggtcctccgtccatgctctatggcgccccgcgccgaggggcttcggccccgcccccttcccggacaggaggtgcgggctgggcccgttaggcggagacttccgggtgtctagggcggtgcccccccgacaacccgggctcctcgcgcctgcgcggccgggtccccgggcccgccgtgaggagagtgaagtggtggagagggacgctcgtgccaccccgggtcctcctaccgtctctatcatggtaaccccttctctgccgctgcacctcccagtggcccgagtccaggtgccttagttactggacagagaccccgggttccttagttactggacagagagtgctgcgcttcaggtgccatggcctcagtttcctcctttctgaagtgatgaaaatacattgtgcgcctccaagtgcttcacacgcactaggtcctagtcctaactagggcctcatggtaggtcctatccctatgttgcaggtgaggagtcaaatcacctaccaaaagtcacacacccggaatgccagagcctcggcccgaacccatggagtttggctctaaattcgtgtatttaacccttgactgtacacactgcctcgtgtcatagccctgagaatccactacttcccccgcgttaggtaggcacctagtaaggacgcactgggtgttagctgttactgttggtattcttgcaaaaaacacatattttaaaataattgtccaaaccatagtgtccttgtaggctggtccttctggtccttcctctgttctgtacttggctgactctcacctaagtggcagatgacttatcgcttataattgttatcatcctcactggtagtcagaaaagataagaagctataattcactggtggaataacacctttctcagcctcaatttctcatctgtggaatgggaaaaaataagataacctgcaaggtaatatgtgtaagagctgcttagttcaatacctggcccatagtaagttcacaaaaatgatggtggttattattacctattagcagtgttacatataagtctattgttgtggccactgtataccctcaaagctcagtgagcatcaatcataagatgtatattattgatttaataacatctttccatggggtggggtgaacagtgctgtgttaactgtgtgtgtcaataggaggatatctgtgtccctccttcagaaatatcacaaaggtaaatttttaaatatatcttagaacagaaggaagtgtggccgggtgcagtggctgacacctgtaaatctcaacactttgggaggcagaggcagacgtcaggaggtcaggaattcgagactaccctggccaacatagtgaaaccccatatctattaaaaatacaaaaattagctgggcgtggtggcggacacctgtaatcccagctactcgggaggctgaggcaggagaatggcttgaacctgggaggcagaggttgcagtgagctgagatcgcaccactgcactcttgcctgggcgatggaatgggactccgtctcaaaaaaaaaaaaaaaaaaaagagagtgaagtgctatcataacagcaatagaaacaaattattagggtacaaactctacacgaggaaacctgtttataagaaaagtcatgtgcttgtgctcctctgaatcagatcattcagtgggtgtcctgcagtgacctggttgttgggagggacagcctcctccctctccagcccattccccttcttcgctggtcaaattgacaacggcaagatcgagaacagctcattggcacaccagatggaagccaacactgaggatggaggagaaacaagacacagggagccagctagacactggatggcttcgtgaaagaggctccgtgccagctgagattttatgtgagagaaatcactttctaactcactgaaaccattggtaattctgagtctctcccttaaggcaacccaaccaataccaggatgtttcccaaacatgggatgggttgcagccgacatggcttaattgacaattaacatctgttcttcccttccgcagtacaaaatcactcttgggatgctgcttcccatcgatggattctgttttccactcctcttggcatctaagtgtggccttgtgattggttctcaccaatgggatgggatggaagcgatacaggcctcttccgagccaatgctcttaagaaacatgtatgttggccaggcacggtggctcacgcctataatcacagcactttgggaggccgagacgggaggatcagctgagtccaggagttcgagaccagcctggccaacatggcgaaactccatctctactaaaagtacaaaaattagccaggcgtggtgggcgcttataatcccagctactccggaggctgaggcaggagaattgcttgaacctaggaggcaaaggttgcagtgagccgagatcccaccactgcacttcagtatgggcaaaagagtgagactccatctcaaaaaaaaaaaagaaacatctgcctgcttcctgctctttcaaggccctaaagaaagaggggagccccaagaaacctgggtccctgaatgaccaccttgtggaaatacatcctgtcacctaacatctatcctagattgctacatgatcaagaaatacacatctaacttgtacacccaatgctcatagcagcattattcacaatagccaagaggtggaagcaacccagtgtccattgacagatgagcgaataaacaaaatgtggcacataaatgcaatggaatagaccagacgcggtggctcacatctgtaatcccagcactttgggaggccaaggcgggcgaatcacctgaggtcaagagtttgaaaccagcctggccaacatagtgaaaccctgtctctactaaaaatacaaaaaattagccaggcgtggtggcgggcgcctgtagtcccagctacttgggaggctgaggcaggagaatcacttgaacccagaggcgcaggctgcattgagccaagatcatgccactgcactgcagcctggtaaacagagccagactccgtctcaaaaaataaaaataaataaataaatacaatggaatattttttagccttaaaaagagagaaaattctgacacaggctacaacatggatgaaccttgaggacattatgctaagagaagcaagccagtcacacaagaacacatactttatgattccacttatatgagggacctagagaagtcaaattcatagagacaggaagtagaatggggggtgccaggggctggggggaggggaatggggtgttagtgtttattggagacagagtttcggttttgcaagatgaaaagagttctggaaatggatgggggtgatgggtgcacaagacgtcaataggtttaacactactgaactgcacagttacaaatagttaagacgtagccaggcgaggtagctcatgcctgtaatccctgcactttgggaggccaaggcctcctggctgaggtcagtaggtcaagaccagtctggccaacatggtgaaaccctgtttctactaaaaatacaaaaattagccgggcgtggtggtgcatgcctgtaatcccagctactcgggaggctgaggcaggagaatcgcttgaactcggaacgcagagtttgcagtgagccgagatcaggccactgcactccagcctgggcaacaagagtgaaactccgtccctcccagacacacacaaaaatagttaagacgttaaattttatgttatatatagctacaatttgaaatgtgtttagaggaaaaagtacccttctaacgtgatgtgccattacaatgtgtgcgtttctttattacagcagcttcacccttccctaatacagagttttcagatgccaggcagtaaaaatggtaaagctccctttcaggggtgcatcagcatctagatggaatttacagcctcgagtctgaataaaattggggttagggggcaatggtgagtacggagagaattgcaaatggctataacagcatcatttcacccaagttggcccatcagtggctttctctggatccttctctttggagagtccctctctggcatagatgccgggatgtgagaggctggaaagctcaaggcagtcttgcttcccaccgtgtggaggaagccagtctgcaggaggagaaaatgaagcctcacagagaggtgagagttggagggagacaatgtcccagctgagttgagtgcctaggccataggttcaggtgcttctactctgcctaaccttcctgagggctggacgttccactcttccttcccttgagtgaatgagtctagacttcttccaggaaagccctgttttgggttcctgccacttgtaaccaaaagagccccaagtctccccccagcactctgggcatcgcaagcctccatctacgtggaatgagtggtggacgaccggaatagccacacatctctgtagtgatatggaaggtcagaggtccccagtgcagaggcacgggcggcagctcctgctggggagccctttataacctcctcacggttttctcctgagggtgtggccctaggccgagtgacaggaacagctgcagctggcagattggagagggagagtttgcagctgttgaagtacaattgcttcgaagtccttgatacacagagaaacgcacacaatcacacttttcaaatgatcctccttacagtgataattaacaaacacttcttgagttttcatcatgtaccggacacactcctgggtgctttgcttaggtgaacatgctcaatcttcatctctactcccagacacagttaggccccggcaggcagcattgacagcacccacagacccatgagaaatgtagaatcccaggccctactccaaacctacagagtcagaatctgcattttaacccaatcctcaagggattcttagccatgggaaagtctgagaagtattgatgccaggcagactccaggatgcccagttaaatgtgaactccaaatcaaagatgagtaattttttagtgtaaaaatttcccaataccgtctgggcacggtggcttattcccgtaatcccagcactttgggagtccgaggtgggcagatcacctgaggtcaggagttcgagactagcctggccaacacagtgaaaccctgtctctcctaaaaatacaaaaattagctacgtgtgatggcccaggcctgtaatcccagctactcgggaggctgaggcaggagaattgcttgaacccaggaggaggaggttgcaatgagccgagatctgcactccagcctgggatacagagcaagtctctgtctcaaaaaaataattaaaaaaaaaaaagtcccagtacttatccaatctatatatataggatgtatatatacatccgttgtttatttgaaataaatgcaactgaacattgcattttaaatgcatcctgcattttaatttgctaaatatggcaaacctatgtggagaaccctgtggccgcctcctataacgttcttcacccatcttcctagatttgcacatctcctccgtgtgccagctgctgcagctggggcgcagagggaggggctttgaggaagcagagcgaccctgcctcagaccaaccattccggcctgtgccccatgcacaccgatgggacagagacgggctgagtggggctctggggaattctggatggcaggatgtgggacgtgatgattgcagcggtggcacgtttcaggttgcatgagacaaatgcagctcaaacggattggaggttaaaaaaagagaaagaaaactttattggcttgggtaactgaaaagaaacagcagcaataaacaccagaagctgaagctggacaccttggggcgtggttggttggatccgggagcacaggggccccaggcctggcccgctgtctgggcttcgcggacctctttggtttccatccctccactgtggggaataaaggccactgcaaggccaaggccaccctcacttcctcaccctgctattatttccctgaatctgattggctcacctgaaccaatcacaggggccgggcaggggtgggagttctgattggccagtccagagtcacatgtccactcctggagcagggcggaaccagctctcataaagcacgtggaaggagaggacggaaggggtgctctattctcccttcaggacagactgggtacagtgactgcagacaagggtgggtgcccagagccaaaataagaggtctggaggaagggtccaggtagccacaggcattccctcatgctgtgttcaccactgtccagagaataagataacccaaatttctccagcttcaattaccatatcgcatttaaccctcacatgaatctcatagggtaggtgctggaaatggaagatagacacatatgtaaatgtgtgtacatgcttccaagaggatatacgaatgcataaatatgcatttcttctctaagaatgaaatgttggctgggcgtggtggctcacatctgtaatcccagcactttgggaggccaaggcaggaggatcacttgaggccatgagttggagaccagcctaggcaacatagcaagactccatctctacaaaaaaaaattaggtgtggtggcgcaagcctgaggtcccagctattcaggaggctgagacaggaggattgcttgagcccaggaggttgaggctgcagtgagccatggtggtgccactgcactccagccttggtgacagagcaagaccctgtttcaaaaataataatgataataatcatcaaatgtttatctcactgaaatgcatttccaaatacatttattaaagaataaatcctcaacttaaatggaattgtccatccattgcactttgtcctgtaaaactttttttttttttttgagaccgagttttactctttcccccaggttggagggcagtggtgtgatctccgctcaccgcaacgtccccctcccagtttcaagtgattctcccgcctcagccccccgagtagctgggattacaggagtccgccaccacacccagctaatttttgtatttttagtagagactgggtttcaacatgttggccaggctggcctcgaactcctgacctcatgatccacctgcctcagcctcccaaagtgctgggattacaggtgtgagccactgcactcagcctgtcctctaaaactcgtgatgccaaggcgaaaaacattgaccaatccaaacacccaaagacctccttaactataaagcttattttcatttaatgagaaaaatatattatgaccctttaggcatcagttcatttcaagcgaatccttctgtggtaaagacaaaatgagatgaaaaattaacgagagctcttaaataaatcgtaaaacctgttaaactttctctccaggtggtgggttgttcccagtgctataaaagttcagtataaattccaagcggttttgaggaacacttccacctggtttcttcttgttgctacaggagtttatttatccgggacagtttttcctgacattattgcacacagtaaaatgtctgaggctgctggttattttattttattttattttattttattttattttattttattttattttattttatttttcgagatggagtctcgctctgtcacccaggctggagtgcagtggcgcgttctcggctcactgcaagctccgcctcccgggttcacaccattctcctgcctcagcctcctgagtagctgggactgcaggcgcccgccac[184 bp omitted]aaggggctgcttggagaagtggcaccagtcttcgtgaaggtcagacagcctgggccataattctcagccccgtctcctgaaggctgtgcagtgtggtgaggagagagagacaggctttggacccctccgatcctctgtggaatggccagaaatagcacaggaggtcctcaatgtcccagagtaactggcactgggaaaagagcacttaatacagcagcccgtattttatatttatgcaagacagttatttccatgtttgtttgggattctcgacaaatgaaacaacaacaaaaaaacacatcattttaagaaaatacaggctgagccgggtgcagtggctcatgcctgtaatcccagcactttgggaagccaaggtgggtggatcacgaggtcaggagttcaagactagcctggccaagatggtgaaaccccatctctactaaaaatacaaaaaaattagccgggtgtggtggcgagcacctgttatcccagctactcgggaggctggcgcagagaattgcttgaacccaggaggtggaggttgcagtgagctgagactgcgccactgcactccagcctgggcaacagagtgagactccatctcaaaaaacaaaacaaaacaaaaaacaaaatgaaacaaaaaaaaaaacagaaaacaatgtatcaacaaagatatgtttaaataaaaacatacgtaaaataaggcttgtgttgacaaacatgtggccagaggctcacaggaagccaacgcagtgtttccctaggagcgttgattcagtgttccctgatgagatgttcatggtggcttgacagaattaccaggaatgctgagaatcgactcctggttgattttgttgtatatttaacaaaatgtaagcaacaactgcagtgatgaatgtatgccccgattcttagaaaaatcaaaacatgaatgaggtgcggatttgtacagtttccccgatgtgactttcacagcacagttataaagaggggacatttgcactttgtgggtctcaccagtggatgtttttactgctgtgataacttcattcctggcagcaatcagatgatgactttttgttttttgtttttgtttttgtttttgttttgagatggagtcccgctctgtcgcccaggctggaatgcagtggtgcgatcttggctcactgcaacctccgcctccagtgttcaagcaattctcctgcctcagcctcctgagtagctgggattacacgtgtgcaccaccacacctggctaatttttgtatttttagtggagacggggtttcaccatgttggccaggctggcctcgaactcctgacctcaggtgatctgcctgccttggcctcccaaagtgctgggattacaggcatgggccatcacgcctggccggaagatgactctttggataatgtaccctatattgtctgaccctgttagggcaaacacctcacaggtgtggccagtgctaaatgagatgcatgaagccgctaaacccagtgctcagacacataagaagtgctcacaaccgtgagtagttattaccattatggcgattgtctaaagtggaatggagaagtgtctcagtctgggttcgagagaggaaacaggtaaatagaccccacgccaggtattttatctaccaaagggtttaatgtagggaattaaatgttcacaaaattattgaatgggctgagcctcctgcgataactcagagaaccacacggaactgtcccagcaaggagccaccgcctttgaggactcatctgtagctctgagttccagaacatatccccagagctgtgatccaggggccaaaagctgccacctgaggtccgggaagtcagagaatggccctgactgcctgccgtggagacacctcatattccactgttatacttgccaggaggaacagtgcaagaggggcaagagaagcgggggaatgaaaatgggccctgctggcag[154 bp omitted]taataaaatacaaaaattagccaggcgtggtggcgggcgcctgtaatcccagctactcaggaggctgaggcaggagaatcgcttgagcctgggaggtggaggttgcagtgagccaagatggggccattgcactccagcctgagtgacagagcgagactcgttctcaaaaaaaaaaaaaattgtgttctgtacaaagagtcacaccacaacagcaaaaaattcaacaccttccttcctctgacaacatcacattctttactgctacttccttaccattgaaaacgcaaccctgcgctatcttcctgccttcagggcaaaaattaaagagaagagctgggcatggtcgctcacgcctgtaatcccagccacttgggaggctgaagcaggaggatcacttgaggccaggagttcaagatcagcttgggcaacataacaagaccctatctctgtaattagaaaaaaaattgaagccgggtgcggtggctcacacctgtaatcccagcacttatgggaggccaaggcgggtggatcacaagaggccaggagttcgagactagcttggccaacattgcgaaatcctgtctctactaaacatacaaaaattagctgggcatggtggcctgtgtctataattccagctactcaggaggc[137 bp omitted]tgcattgcccggcttcttaagccttcattagaactgctctccacttcccccaacccccggcagagccctctagcacaagccctaacgctctgaaaggcctcttctgactctttgtacagggatcccctggaatgcgtcctcccttgctgaaccaagataaataaacctcactgccagtggttcttttggcccttgatcggctttccgcatcttactcgagtgcacttaattagcaaagcccagttcagcccagaactctagctctccagaggtctgggaaatgcagcttcaatctccaaccggagagatttctctccagagagtaaagggctggaagtgggggcgagacggaagccacagtatcaacctctgagaagccgcgttcattcctgccagacattgcgagatacagttgggaagaatttccaaggaattcttctctgccttggcagtgagggtaaggtgagcttgactcgctcctcctgtaggccctgctcactctctgaacatctaaggaagaggatatatctggccggtggaaaacctgctgccggagctgggtgg[133 bp omitted]cctccacctcttaggttcaagcaattcttctgcctcagcctcccaagtagctgggattacaggcatgggccaccatgcccggcttatttttgtatttttagtagagatgtggtttcaccatgttggccagactggtctcaaactcctgacctcaggtgatccacccacctcggcctcccaaagtgttgggattacaggcgcacaccaccatgcccggctaatttttgtatttttagtagagacttggtttcaccatgttggctagactggtctcaaactcctgacctcaggtgatccacccacctcagcctcccaaagtgctgggatcacaggcatgagccaccgcacctggctagaatgcccttcttgagcctcagtttcctcatctgtgagagagactcaggacacctgctgctggccttaaaacccgggtctcttgctgtgtcacctgggaaagtacacctgctccactgagcctcgattatcccaaccgtaaaatggggtgattctcaggccgggcgcgatggctcacgcctgtaatcccagcacttcgggaggc[272 bp omitted]tgctgcctcgccgggggagcatgagggggaagtcagataatgggcaatgtgatccatcattaagcaattcgttcattaatttcattatcctttctcaaacgtttcctgttgcctgggaagccaaagatgactcaggttcagatccagccccctgggagcctgcactgctagacacagactgacatccatacgccatccccccttctgctggttcttcccctttctgctggttctccccctcacacgctcactcagctcactcatgcgtccatcatccactcacccataaacccaacccgagcctccagagatgaaccaaaccccatccctgccctgggggatcttagtgcttcaaagcaccatacaaagagaaaaaccttaattattatttggggtaataattatagcagagctacaaaggagccgagaagctagaaggtatgagctaaatttgctgtcaaaggaattctcgccctcaggcctgggaagcagggtaagaaccacttgccttcactcttatttactcattcacaggcaggccccaagccaggagctgggtacagcaggcaaggagggttggtctctgttgctgagtcgctcagcatgaggtgggcggagcagtcacccaaaaatagtatatgaaatggagaaagagggggctctgcggaagctccagtgaggcacttggtccagacttacaggtgtgggggtggtctgggaaggcttcctggaggaggggacgtctgatcacagagtattatatgatgttaccagatgaagaagtggaggaaggacatttccaggaagtcgttccttcatttcattcctcaccaagatttatggcccacttaccatacattaggacctgtcctaaacgctggtgtgccaacattgcacagatcgtcaaggtgatatttatgtaaacaggacccaggacaaaattaaaatgcagagccctgtgtttaaaaaaaaaaaaagtattaagaatttcaagctgggtgtggtagctgtaatcccagctactcaggaggctgacgcaggaggatctcgtgaggccaggagtttgtgag[212 bp omitted]gaggcaggagaatggcatgaacccaggaggtggagcttgctgtgagccgagatcgcgccactgcactccagcctgggtgacagggcgagactctgtctcaaaaaaaagaaaaaaatgtcaagatagccacagctgggcattcaaccaagtgcagggcagcctgcaaccacacaggttgcatcccatgaagctggccccggatatgtgtgacttgctgtcacttttggcttcaacaacagacaacttgactcaaaatggcttgaggggacttactacttcatgccaagagaagcctggaggtagggcaggtccagccacggttggttaaaattcagctgccaaaccatgccatgaaggatccaggttcctccgtctcacctcccttccatcctaagtgaggagctcccactaccagccctcatggtacccaggtggctgccacagcttgaagtgtcacctgcagacagggcagggctccagggcaactgtttcttcctgcttatcagttgcttaagagttgggaaaacctttcccagcagtgccccagcaaatctgccttcaggtttcattagccagaatagtgtcacatatgtgagcgtcaaccaattgctggcaaggagaaggggcacagcaaaattggcttacaccaataaggacctgctcctggtcaggcagggtggctcacactggtaatcccagcacttcgggaggctg[135 bp omitted]ctgaggcaggagaatcgcttcaacccaggagacagaggttgcagtgagccaagatctcaccactgcactccagcctgggtgacagagcgagattccgtctcaaaaaaaaaaaaaaaaaaaagctaaaaaaaaaggacccgctccttattgggcccttgggcccttattaaccacgctcacccccaatcccaactctctgagtgtgttatgacctccattcaagtgaagacgccgatgagctgagatccccaggctctctcggctggggcatgttgggtgggtttggagccctgccctcacccactgtgctaggccctcaactctggctggacactgattctgtgtactctgtccaccctcggatcctttgtgcccatacaacatttcatctgtctcattataggtgtccagtttgtatgaagtgaacaaatgctgagcagacaatagccagtagtgaaacaagctgtttttgttgcacggatgtggggagggagggaagagtcaactttgcatttgagctgggcttgcttttatcagcgactccactggagttaagtaagaatagcaagtgtttattgaactcgtactccctgccaggtagccttccgagtgctttgcgtgtattaactcatgaatcctcccaagcaccctgtgaagcggcgactattctagagtgcaggtagaaggtaccgatgcataggagtgcgcctttgcatcccctggaggccttgttgaagtaaatcgctgggccccctgctagagttgctgattcagtctgaggcagagaccgagaatctgcatttctttttttctttttttagacggagtttcactcttgttgcccaggctggagtgcaatggcacgatcttggctcaccgcaacctctgcctcccggttcaagtgattctcccgcctcagcctccttagtagctgggattacagggatgcaccactacacccagctaatttttttgtatttttagtggagatggggtttc[142 bp omitted]gcagctggtctggggactacactttgagaactgctgtgttagaggaacttaaaagagtgacccatgaggcctggcgcggtggctcacgcctgtcatcccagcactttgggaggccgaggcgggcggattacctgaggtcaggagtttgagaccagcctggccaacatggcaaaaccccgtctctattaaaaatacaaaaattaactggtgtggtggtgggtgcctgttgtcccaactattcaggagtctgaggtggaagaatcgcttaagcctgggagaagggggttgcaatgagccaagatcaagctactacactccagcctgggtgacagagcgagactcagcctcaaaaaagaaaaagaaaaagaaaaaaaaagtggccaatgagttgaaacatagtgatgaagaaggaaacggtgttggatcgagagcctgtgtgaaccctgtatatgacatgcaggcacctggccaaccaggaagaggtggctggaatattcctccggatctgcctgccaagctgtgtgccccggctcagttctgcagtgcttctgagggccatgcttttctaacacacacaaaggcactctataagctaaaggagctctgggtctgaaggcacatcatgtgggactgtgcaggctagcgacaagggtttgcaatggagggttttaagcaaa[152 bp omitted]gtctctattaaaattacaaaaaaattagctgggtgtggtggcgggcgcctgtaatcccagctacttaggaggctgaggtaggagaatcgcttgaaccctcgaggtggaggttgcagtgagctgagatggaaccattgcactccagcctgggtgacgagaaggaaaactccatcttaaaaaacaaaattcctctgataaatgggtaaacaaaatatggtctgtgtatgcaacagaatattaggcaatctttaaaaggaaggagattttgacatacactacaacatggattaaccttgaggacattctgccaagttaaataagtcagtcacaaaaaacaaatacggtatgattccacttacatgaagtattaatgtggtcaaaatcacagaaactgggctgggcatggtggctcacacctgtaatcccaacactttgggaggctgaggcaggtggatcacttgagaccaggagtttaaacccagcctgggtaacatggcaaaacgctgtccctacaaaaaaaagaaaaaaaaaaattagctgggcgtggttgtgtgcacctgtagtctcagctactcgggaggccaatgtgggagaatcccttgagcctgggaagcagaagtcacagtgagccaagactgagccactggactccagtctggccaacagattcagaccctgtctcaaataaataaattacagaaactgataacagaatggtggttggccaggagctcgggggagagaggaatgggtggttcacatttaatgggtacaatttcaatttgggaagat[134 bp omitted]acctccaccttccaggttcaagagattctctggcctc[220 bp omitted]aatgattaagatggtaatttttatcttgtatatattttaccacaattaaaaaaaaaagatccctttggcgctgtgtggagcaggaactgaggggcaggaggcagaagaggcgagagtggaagcatgacagtgtctaaagaggccatggggacttaaaccaggtggtagccatagacgggagagctgtggacagattctgcatctattttgaagacagagccaataggacctgatgatagattgcatgtggatggtgatgaaaaagaggaattggctgggcatggtggttcacgcttgcaatcacagcattttgggaggccgaggaggcagatcacttgaggccaggagttcgagaccagcctggccaacatggcaaaccccatctctattaaaaatacaaaaattagctgggcatggtggtgcacgcctgtagtcctggctactcaggaggatgcagcatgagaatcacttgagactgggagtcggaggttgcagtgagctgtgatcgcaccactgcactccagcctgggcaacacagccagaccctgtatcaaaaaacaaaacaaaacaaaacaaaaaaccaaaaaaaaaaaaagaaaaaagaatcaagggctgcttttctatttttggcctcaacatttgggtgaagatggacttgctttctaagatggtggagtaatgggaaggaacaaatttcttcgcaaggtgggggagagagtgaaaaattatctactgcccaccttaggtttgagatgcctattaagaaatccaagaggagatgtcaagtaggccatcggatatgagtgggaagaagatcagcgtgctctaggagcagaaaggaggcatgactggaactcattaaacacgaggagaagacagtggtagacaggtgggccagggcagattaggccaccgtgggcaaactggtcacaaagttctgagtcagccactcatcgcttgtgaaacctggggaaagttgttcatttatgaatataagacgaacaacttccatgtaatgaatgcttgttatgggtaagccactgtcttcgtttttatggcgcggagtcttcagatcagccggggaggtggaggatgggagggggattctcttatccttgttgtacggaggaggaaatacgctgcgggctggggtagggcttgtatgagccataatcaggtctggaactgtctagataaaaacttcagctgatctcttaggatgtctgtctgctctaaaatccaaatatgcttcttcacagttctgagatgcagaaactgaggcctcaggacggggcagtagtctgtccaataggggcacagcgaggacgcgtggcaggtagcgctgtcccccaattcaccccaggggaaactgaggctaaagagagggcggtgtcctgtccaggttcacacacaggaagagccaaaccgaggcccccgcgctggccccctcctgagccactgcccaccccggaacaggagggcagcctgctcacgtcctgattcctggcaccgacatcggcccttaagttctgcccgggtggagagggaggacaaaaaaaaatgcgatccgtagtcaaggagacgtagcctgcactcctgattggcgcagaactctagcctggtctcctcctcctcctcctcttcgcttgccagcttctagagctccggaggccccacctcccaaatgcccggcggtgcccggcctcccctgatctccacaacaacgccgccatggctcctcctcctcctccctctttttttcccggcacttctgcgcatgtccagggcccgcgcgcagaccactgggaagcctcctcgtgcattctgggaaatgtagtccaaagcctgtcgcgctcagacagcccgcgacatttgcgccgtcaaggccaaataggctgcagacgacgctttcgcgtatcttgggaaatgtagttccagtgttggcgaagacgccacgcggtgacaaacaggagtaaggcggtccccaggcgagggccaattggcagccgcctttgccgcgatgcttcctgggagttgtagttcggggtgaggccggggcttcatggggagttgttgggctgaacgagcggctcggagtatgggattgggggagggggacgggggagtttggcgcaaagcctgctggggcatggagtcccggcgagctttgtgcgcatgtgcggggaggtgagggggcttggggggcctcgcctgagagagtgaggtgagcgaggggggaaggagggagggattgggtgggggcggttggacgagggagggaccagaggttggatgggaagaggggcgccgggggcctcaggagggaaagatgggagacttgcggggaggggaggagaagggggctgagtgatggggaaggggctgggagagggaactagagggggagggacttggagagggggaggggtggatagtgggagggggtcgtggatcctcgaggtcctgaacgcgggagagaaatgctgagggagaggacgggggaggggcgcctgggggagggggaggggcgggacgggggagggacaggtgggggaggggaaggggaccctagcagagggtgggctgtgagatgaaagctgagtgggaagctggaccctacaaaggagtctgggggcgccgggaccggaccccttcggaaaggtttgcgggaaggggcttccggggacgatggttattgttgtaacgtagatacggcgcaggtggctcgttttgcgcgctgcttctacaagtgcaacttttacagagttgtgagattcctgaagataagaatcgttgctctgttttgctgctttctcagtgcggagcatctgcctttttagcttgttgcaaggcattattaccttcggtaatatgtgtaaagtgcttagaaactctgtttattgtcaaatgaagttgacccccgccacctctaccccagtcaggatggagtcaccctcctctatatccgattttaacgcctattccaatgtatacttagtattttaatctgcgtgcgtgttcatagcagtgtcccctgggcacctcgcagggaaacttcgacaaagtaaccctaagtctgactggacacttactagccaggtgtggttctcagcatttttgttctccttctatcactttacagtcaacgaaatggagatacagggtattacaaaaggtgccttgtacctcgtccaaggacacagagctggtaggaggcagagctggaatttgccccagagcctttgtgccgtaggtaaatatttgtccagtgggccagcggctctcaaccaggagtggttttgtcccccaggggacatgtggcaatgtctggagactttttttttggtttttccaacttgggaagtgctactggcatctcatgaaaagaggcagagatgctggtagacatcgtatgttgcacaggatagcccgccacgacacaagtgccattaatgtcgaggttgggaacctagagtagacaaaccggtctttgtcgagcacttagcctttggaggctgcttctaactcctgctcccagcagcctcttgagaggaaggagctcttgttagtcctgtgtctcaggtggagaaatgaagcacagagggggtaagtcacacgtccacagtcacactgctgatgagtggcagagctggaagttgaagccaggcagccagactccacagcctcttagccatgatattaacccagcatatgtgggtgctggtgccggggtactaggtggaactggtgtggactctggagtcacatctgggtcccatttgtggctccttcactctctgagcatctccctatggtaagaggggacccatctccccagctcacaggtctgttgggaaggttgggtggggcagtataagacactagccactcagtggctgtcttcaaggcatccagggtgcctggctctggactggactgtgctttgcggacacagacagctagacagcagggttacagctgttgaatgcacatagcacagggcgctcattggatggtagggtggattgacatggtggaaggcccttacttaacagcatgtgctttcttgggagcaggccttgtgctggatggccccaccgacccagtgaagagctggacttggtcactgccccagagagctcactttctggacagcccagggtgtagtgacctgtgatcacctctgagattgcaaacagggtcagcttgatggcctgtggcattgctctctggcggaaattcctccttagtcccagagggatcttttttatagcagagcaggcatctgtgtggcttttgagacttggatctggcctgggtcttccgataagtctttctgcctgctcccaggttcatcagcccttaaactgatggatgggtggggtgggaggtgatgctgtggcctggctgtggatgtgcaagtccaggctctgccacgtgttagctgagtgactttaggtaagacatctccccttgctcctgctgcaacttgggggtagtaacaccaacctcatgggattgatcagcctgtaaagtttatttgagtgctagccagaatgctggggttggaatatggagtctctcgcccacatgaattgtagtgaagaaagtcagcacacagatatcgtaacactagatcttgttaaatgctgaaagaaaactaataagggtgacgtcttagcaactgggggaagggcacgtgggtgcagcatcggagggggtgatctggggaggctctccaagggggtaataattgcatggaggcctcagtcatgagaaggagtcaggtaagcaaagattggggggaaagagtgatccagcgggaggcagcacaggtgcagaggccctgtggtgggcactggccttcggtccaagaagatagaaagtgagccagaccgggcacagtggctcactcctgtaatcccagcactttgagaggctgaggtgggaggatcacttgagtccagcagtttgagaccagcctgggcaatatagtgagaccctgtctctacaaaaaatataaaaattagctgggtgtgttggtgcctgcctgtggtcccagctgctcaggaggctgagccaggaggatggtttgagcccaggaggtcggggctgcaatgagccgagaggtcatgccaccgctccagcctgggcgacagagagagaccctgtcttaaaaaaaagaaaaaagaaaaaaagggatccattgtggctggagtatagagaatctgggagcaggcagagatgagaaagtagggctgggctgcatggtctcatggccatagtaagcaatttgggttttgagcatcacaggaagcagttggagggcactgagcaaggaagtgacagggatttacagtgaaaaagtttttgtgatcactgtggagtgatttggctctaggtggcgagagtaggcatacacgggtcttgtggcagccgtcccagcaatgagatgacgtttgtggttagtgacatggcggtcaggagcccaggctttggttgtatcaggaggaaaattgtctgaacacagacttcctctcagacctcaccggctagaagcagattatgtgcccaccctctgccttgtggtcaaggggactttgctatatagttccttatgatacagtccaagctgctgtaatgaagagaccccaagtacagggctccacataggacagaactgattcttttctcccataatactccagaggtgttctggggcgggctggcgcctgagccccatggggtcatcagggtcccttctgtcttgatcttccagtgtccttgaggtcaggggccggcagtcttgtcctgtaaagagccagcgagtgactatctttggctctgtggacagccttacaggccacccaggccctgtcacagccactcggtagctccaaggcggccgtggacagcgcgtgagcaagtgggcgtggatgtgcgccagtgagacttaagtaaaacaggctgcaggccagattcggcccaccagctcagagaccaccatttctcaaatgctttgaagtcaggactcctttctgccttcaaaattactgaagaccctaacatgcttttattgatgggagtcatatctattgttacgtatcatagtagaaaccaaaacagaaaattgtaaagtatttattaatgcatttaaaaatggcaatcacggctgggcgtggtggctcatgccggtaatcccagcactttcggaggccaaggcaggtggatcacctgaggtcaggagtttgagaccagtctggccaacctggcgaaaccccgtctctactaaaaatacaaaaattatccggacgtggtaacgcacgtctataatcccagctacttgggaggatgaggcaggagaatcgcttgaccctgggaggcggaggttgcagtgaaccaagatcgcaccattgcactccatcctgggcaacagagcgagactccatctcaaaacaaaaattaaaaaaaaaaatagagacaggagagctcgctgcctctctctattctacgccatgggaggacacaaaaggaggccgtcggcagcctggaagaggtgctcaccagaacccgacagtgctggcacccagatcgcaaattcccagcggaagggactgggacaggccgtcatagctgtcatagcggagcaccgtggactgaactgctatgagcttatttctcagttctgggagcgggaagctcagaatgccatcatggtcagttcctggtgagggcctctgccaggctgcaggtggcctccttgctgtgtgctcctgctggcagagatggacagagtcccggtgtccctttctcttataaggccacagccctattaggcccagcccttgtgacctcagttaactttcattaccagttaaaagcttcgtctccaaatacggtcacactggggtgagagcttccacatgtgaattttgggagacaaattcaggccacagcagttagttggggtggcttctgagtaggctgcaaagtgtctgctcccagggtgtggggtgcacggccccacaagtccagtgagggtggtgctgatggtgacctgctgctgccaggcctgctgcaagctctttctgtgttttctggttgaatcctcaggacaggctgcgggaggagctgcaggactgaggtacagaggccaggggcccagggcaggacccagcctggacttgactccctgggatcccaggaagggcacaccctttcctcaccacccgagtgagcgctgccccctcacagagacctctttgccccctgggccaggcagagcaggtgagtgctttatcttacaggggaaaccgaggcacagaggccgggcctatcctgggtatgtgggcggctcagaagcgcgggtcccaggccgggtgcagtggctcacgcctgtaattcccagcactttgggaggccgaggtgggcggatcacctggggtcaggagtttgagatcagcctggccaacatggtgaaaccccatctctactaaaaatataaaaattagcaggcgtggtggcggatgcctgtaattcccgctactcaggaagccaaggcaggagaatcgcctgaacccgggagctgaggttgcagtaagctgagatccgccactgcactccaacctgggggaaagagcgaaactccgtctcaaaaaataaaaagtaaaaaaaaagagcgttggtcccattgtgagtctgggcaccgcgggcagggtctcggcgggcaggggtctcaccggcttgttccctgcaggcgctgcggtccgggaggccccatggaggtggcggtgcccgtgaagcaggaggccgagggcctggcgctggactccccgtggcaccgcttccgccgcttccacctgggcgacgcgccgggcccgcgggaggcgctggggctgctccgcgccctgtgccgggactggctgcggcccgaggtgcacaccaaggagcagatgttggagctgctggtgctggaacagttcctgagcgcgctgcccgccgacacgcaggcctgggtgtgcagccggcagccgcagagcggggaggaggcggtggccctgctggaggagctctgggtgagcctggcgggactgcaagcggggaagggagaggggaaggtgccagggaagccaccaggaagcccagggaggagcaccactgaacccctgaaaaccagtgtgactcgcggtggggaggctgcggtacaggctgcggtacagcgtggagggacagtccacgtgcggcaccctccatccccacaccagctgcaagtcaggagggccccaagaccctggcatacttgcgagttctctaggactcacagccgtgttcacggtcacggcttatcagagaaggacgtgctggaagcagctgggaagaaggccacgaaggctccagggagcgcagttaccagctgtcctctccccgcaccccgcccgcacgcagggggtcttgccggccaggaattctcctcagaccgtggtgtcctgggttcttactggggactcctccccgttctgtgtggctgacctcagcctcccgccccctgaaagtcaaggataccccctggtccaaactctaccccaaattcatcttgcttttgggctggcctgagtcccccggggcaggcagaccctccttatcatgcgtgaggctccaagggctcagagatgacttcccaggggcagagggcaaagccaggcctctctgggcaggtttggtttcttgaccacacagcaggcaagggccgactcacgttctgggtgaagtcttggtgcacagccacacccacccactcatgtcacctggggctgacacttgccaccgtgatgaccacagagggcccgaggagctggaagtgttgactgcctggccccgtcagggaagttgccagcctggcttagagtcctgtcgggggatgtgttatgtgagctgcacatgccatcttaagtgttctagtcagcacgttaaaaaaaggcaaatttacttcatggaccccaatgtgttcaaaataccatcctttcagtagtggcactctcccatggctggtggctgctgtgtggggcctgggtgatgagcggtgggcagccacgcagagacctctgagaagagtggtccaggccacgagagcagccagtgcaaaggccctgagccacctcgagcggcacaggggccctgagtgagggggtgtttgcggccaggcctgagtccccagtggcaggagggtgaagagtcagagcagtcgcgtgttcctcataagtgcgtaccgagtgcctgctgggtgctgagatgtagcagcagagagggggcatctcggtgaggcaaagcgagcaaagccttcagtccatggcagccgggcggccttccttccttccagagggagcagctcccgtcaaggctgccagtggcctcatccgtctcccttctcatgcggcccgaccagcccccagacactcccccctcttattgtctgggatacagctcgcccctcctctgctcctgcctcctggcacctctgtgctggctctggcttctctatcctcgccctccttccgggtcattgttcccaaaagtgggttgtaacaaatcacaaacgcagcggcttacaaatcacaaacgcagcggcttagaaatcacacaagtctgttacagttctggaggtcagaagtccaaaatggtttggtctcatggcccaaaatcgaggtgtctgcagggccacgtcccttctcaagtctccaaaatcaaggtgtcatctgcagagccacgtcccttctcaaggctctaggagagaatccgtttccggccttttccagctcctagaggctgcccgcattcctcggctcatggcccttcctccgtcctcagagtgctgcactccgacctctgcttccatcccccatcactcctccgaccttgacctctgcttccatccccatcactcctccgaccttgacctctgcttccatcccccatcactcctctgaccttgacctctgcttccatccccatcactcctccgaccttgacctctgctttcatccccatcactcctccgaccttgacctctgcttccatcccccatcactcctctgaccttgacctctgcttccatcccccatcactcctccgaccttgacctctgctttcatccccatcactcctccgaccttgacctctgcttccatcccccatcactcctctgaccttgacctctgcttccatcccccatcactcctctgaccttgacctctgcttccatcccccatcactcctctgaccttgacctctgcttccatcccccatcactcctctgaccttgacccacttaggtcctgtggtcacttatttatttatttatttattttactttaagttctgggatacatgtgctgaacgtgcaggtttgttacatgtgccatgaaggtttgctgcacataccaacctgtcatctaggttttaagccccacatgccttaggtgtttgtcctaatgctctccctccccttcccccaccccccgacaggccctggtgtgtgatgttctcctccctgtgtccatgtgttctcattgttcaactcccacttctgagtgagaacacatggtgtttggttttctgttcctgtgttagtttgccaaggatgatggcgtccagttcatccatgtccctgcaaaggacatgaactcattctttttcattggtgcatagtattccatggtgtactgtggtcacgtcttaggtcacctgtgatgacattcggcccgtcaggatagttcaggagagtttccccatgtcagtgcttaactccctcccatccacagagtccttgttgccctgagacagcagatgacaggttctggggatcagaccgtgtacatctttggggccattattctgtctgccacagaggcgaggtgaatgcaaggtgaagtgggggtggaacagaaccaacgtggaatctgtgagcctcggggtttcgccctttccagtttccatgactcctcagaacaggacctggcacatgggtgctgtctaggtagatttcagccactgttaccactctgagctcatgccatctgttttgttggcattaaaatgttcttttaggaaaagatggtaaaagtaggtggtggttattgttgcttttaatgtatatatcttgcaaaataaaaaaaaatcttccattcggggatgcagtgagagttctgttggttcagtgaatctaaaagtcgggaaatcaccaggctccaggccgtcgggactctcctgcgttctctgcttgctccgaggcgaacctctcactgtggctctgggatgtctttagcatctctcttgtatctgttactctctctttttaataagggcagatctcaggttcagagccttctcctatcagtgtccacacagacgggaataacactgccgtgagtgatggaatttcccatgacctctctctctggcacatgatactggctttccatttccagcaatgatacaacatggtcttaagtcagtgttattttagttttaggtaaaagtaaagaagagtaataagagcctgggcgatagccattgtagctgacggtggtgtatagacagctgacatctgggggcgctgctgtggattggggtttcttggcatctggtctgtgggagctgacggtgacgcatagacagctgacatctgggggcgctgctgtggattggggtttcttggcatctggtctgtgggagctgacggtggcgcatagacagctgacatctgggggcgctgctgtggattggggtttcttggcatctggtctgtgggagctgacggtggcgtatagacagctgacatctgggggcgctgctgtggattggggtttcttggcatctggtctgtgggagctgacggtggcacatagacagctgacatctgggggcgctgctgtggattggggtttcttggcatctggtctgtgggagctgacggtggcgcatagacagctgacatctgggggcgctgctgtggattggggtttcttggcatctggtctgtgggagctgacggtgacgcatagacagctgacatctgggggcgctgctgtggattggggtttcttggcatctggtctgtgggagctgacggtggcgcatagacagctgacatctggaggcgctgctgtggattggggtttcttggcatctggtctgtgggagctgacggtggcgcatagacagctgacatctgggggcgctgctgtggattggggtttcttggcatctggtctgtgggagctgacggtggcgcatagacagctgacatctgggggcgctgctgtggattggggtttcttggcatctggtctgtgggagctgacggtggcgtatagacagctgacatctgggggcgctgctgtggattggggtttcttggcatctggtctgtgggagctgacggtggcgtatagacagctgacatctgggggcgctgctgtggattggggtttcttggcatctggtctgtgggagctgacggtggtgtatagacagctgacatctgggggcgctgctgtgcattggggtttcttggcatctggtctgtgggagctgacggtggtgtatagacagctgacatctgggggcatctagtgggagctgaccgtggtgtatagacagctgacatctgggggcgctgctgtggattggggtttcttggcatctggtgtgtggaaactgacggtggtgtatagacagctgacatctgggggcgctactgtggattggggtttcttggcatctggtgtgtgggtcctcgcctgtcctcagagttttcaccgagacattgccggatgagaaggagaggacagccgaggagaggctcctgtactggtagaaagcagtagagctcacctggaaacttttaaaaaatactgtcggccgggcatggtggctcacgcctgtcatcccagcactttgggaggccaaggtgggcagatcacctgaggtcaggagttcgagaccagcctggccaacatggcaaaactgcgtctctactaaaaatacaaaaatcagctgggcatggtggcacatgcctgtaatcccagctactcaggaagctgaggcaggagaatcgcttgaacccaggagctggaga[131 bp omitted]attcgggcctcagcttcagtaattttttaactgaatgtctccattctcctgttgaaggacatttgggttgattccagggttttgttttttttttttttttaatagagctggtttacgtctctgaataggtttctgtgtgaatacacgtttacatttatctagggtaagcgcccaggagtgcagttgctgggttgcgtgacgtcttagtctgtttgggctgctgtaacaaggtaccataggctgctggctgaaaacaacgggaatgtatttctcacagttctgcaggctggggagtttgagatcaaggccaactcagtgtttggtgagggtctcctgctggttcacagatggtggcttcctgctgtgtcctcacagggcagaaggggtgaaggggtctctctggggtctcttgtagaagggcactaatcccattcatgagggctcccccttcatgacctaatcacctcccaaaggccccacgtaatctcattaccttcagggttaggatttcaacatagaatttgagaggcacacagacatttggtctgcagcagtcttctgtccattttcagactgggttgttttcttgccctggagattccttcatgttagtctggatgcatcctctgccagctagtagactttcacattttttttaaaagtgcctcatgacctgtgtgagccactggagttggggaccaccaataagagagagcccgtcatccaggagggggcaggctcttccatttgggggagaacaggggacatttgggaatcacagcctccatggttctaaggactgttcccatctcctcagagtctaggggacttagagaaatatatagccttcttggctacgttggccttgtcgagtttgtttatgacttttttatggtatgtctagccccagctggaatgtagtctcatatagtctcctgtgggttggggccttgtcttttgttcagtgatgtgtccctggagctcaggatggtgctgggcacatagtaggtgctacaaaaatactcgttgagggaatggctaacccttcccagcctcctcttctcctgctgtggagggaatggctaaccgttcccagcctcctcttgtcctgctttgatatacaggatttgacaggaagaccagggtatggtcagcttcctcacttctgtggagagagaatctgatctgtccagaaagatcgaatgacctggctgtagtcactcagcatctggcctcaggcacacaatagggaaaggggatagtttaagacggatgggggcagggcgtctgccaatcggggaagtgcagagaaaagccagtggggtaggcctgggaggtggggagaggcagctccagccagtacctggttagcttgacaggaaatgccccagtcagcctgcgtctcaggtcggaattgaaggggaggccctggggctccagaggcagctgggagcacaggaaaatagcacagggtagctgttcaatgtagaagccaaactcagaagattagcagaggacaggttgataatcaaggtccaaactcaatatttgaaaagaatagtagaatagtgcaaaccttcagcaagttgactaggaggaaaacaagaaacagcacaaacactgatggtggaagcaagcaaagccggggatggagcggatttgacaaccgttgagaacaccgtgttcaacgtacacaatgcattcgaagtcctagatgaaatggacagttttctaggaaaatataaatcaccaacatatgctcatgatgtagtggcagatgtgagagtctggaaaccagaggggggagatcaaaaggtgatgaaagaccttcgcgtatagaaggcactggattccagcactttatgtgtaagttctaccaggcctccaaggaactgatcattctcatctgttcttttttttgaggcggagtctcactctgtcgcccaggctggagtgcagtggcgtggtctcggctcactgcaacctccgcctcccatgctcaagcaattctcctgcctcagcctcccaagtagctgggattacaggtgcatgtcaccatgcctggctaatttttttgtatttttaggagagacggggtttcaccatgttggccaggctggtcccttttacacaaacttccagaacacagggaaggtgttcctcagctcactggcaaggctgccacccccacccccacccccaaccacctaacaggacaaggacagcacaggaaaagaaggttgcagccagtctcatgggaccctcaacagaacatcggcagcttgattccgcagtgggtggacagacctatgtgctggggcaggtggagcttagcccagatacacgaggatgcttcatccttaggggatcctcagcagaacatcagcagcttgatcccacagtgggtggacaggcctatgcactggggcaggtggagcttagcccagatacacgaggatgctgcatccttaggaagtctctcagttagtacacagacttcaaagccgaccagagtctctcagttaaagtacacagacttcaaagctggatatgagtcctgcctccaccttttccaagctgggtgaccttggacgcatgtctgggactctcagagccttggcttcctcagctgcaattttggaatctcgattcctgagccctccagggatgggtgtaaggagggctccatcaggcagtgtgttcctggctgtgccaaattggctcagtcagtcacacacagggtcacagcttattacagagaaaggacacagatgacaaccagccaagggaagagatgagtggaatgggtggaggaaggctctgtgctcggagctcccaactgtcctcctgccgtggagtgtggacggcgctaactcctcccggcaacaacgtgtgacaacctgcagggggtgctgctggccaggaacgcttccccgagctcggcactcggtctctgttggggttgtgtgtagatatgctgaccttcacctccatccctggcagaggccgagctgatgcacatggcccagacccccaaccctgagtcacgctgtgggctcagcccacccgggtggcccagggccccaggtgagcagaccctgccatcaggcagtgtgttctgggggcatagaggtgaccctccctggagccaagggcagaggccagacctctctggacagggctgagcctcactgcacagcagcagcatctcgtcagtctccacgcagcctgcagggtccgtcctgggtactggtgtcatctcagggaaggaaagcagcttgcccgaggtgacacagctggttcaggggcagggggggatctgtggaaaaaacgtactcaaagtatctttttctattctcagcatcagtgaccacagaagacgtctgtgaccaaatgttggagggggtgtcccctcacataccgaacaagcaatcaactctgcagcagacacaagctgggtgtcctctaatgcatttccaacatggtctccctggagacagtgccagatcccacaggttgagggctcacatcccaagactgaccccccatttctgatgccagtcacaagccccaggttatttcatctgtgcttccaactgacaggctgtacatcgggctcccacagcccttcctctggttccgttaatttgctagtgtgctcacagaaccagggaaacatgtttaccgatttattgtaaaggagattttaaaggataccagtgaacagccagatggagagccacgtatggtgaggtctggaagggttccgagcgcaggggcctctgtccctgtggacttgggatgcaccatcctcctggcatgtgggtgaggtctagtttaccttgctgtccacctccacgagttcagctctctggaagctccctgaaccctgtccttttggccttttatggagacttggttgagaggcataactgaagcatggacagccatgtagaaatgtgattagataaaacgggtgtgatcgaatccgagtagaccgagcggggaaacctcgcaaggcctgtgtgttcagacccttcttggcctcctttggctttctttcctccagggtaggggcaggaccccttctgaaggggggtgttatggcccacaatcagacaaattaggtcagaaaaattttttatggccagaggtgggggaagatttaaggatatttttagtttttaaggcctgccttgtggagaaagaagagcaggtgaaagtagggcagaaggtcagggagagactctttttctgaggcctaaagcttcccatcgttagaacaagaccgtaacaagggctgtgggagtcatgagccaggagccgtggacagagcccaatgtatacgtatcataaaatcacagggagggttaggaccccggggctgctccatgctccccccttctgtgtgcctggccccacaaggcgcgcctgtccccgcatgggtgtgccctggatgtctcttcctgtggacaatgcctggccagcgtcccctgtctctggggcctcaaaccaggaagttccccgaggaatgggtggatctcaggcttttctgtgcccaagatctctgggagaaccgtctgctggcacggcttcccaggctccactctcaggtgtgtcaaccccggtgcccttgagctgaggccaggacagcacccctgcccagcctctgcctgtggctgacaccacacaagggtcatgggagccccgccaagggccaaggagctggagggtggtccagggtggtgctctgggcccgagtgagactgtgctcttctgactctctccgatgggccccagagcccatcacggtcccacagccaggttgcgaggcacctaggatctagtcagcgttgtgccaagcccccatcctcatgcctcagctgcctgagtcactgggattacagtcatgagccaccaggcccacgctcttgtattttgacccccttatttaggaaacgttttcttgtctgtcagagtgagggcaggtggtttgcccctgccgctttgcttttttttttggagacagagtctcactctgttgcccaggctggagtacagtggtgtgatctcggctcactgcaacctccgcctcccgggttcaagtgattctcctgcctcggcgtcccgagtagctttgattacaggtacgtggcaccacgcccagctaatttgttgtatctttagtagagttaggatttcaccatgttggccaagctggtctcaagctcctcaccttgtgatctgcccgcctcagcctcccaaagtgctgggattacaggtgtgagccacctcgcctggcctaggcattgctaattttcacaccagtgattgctttgtgatccacgtactcctctggccaaaaatatttgaaacggggaaaaggtgtggtgcgtgacttagctgtcataggcaccagaagaattctcatccctttcccttggggacgtggttttgaggaattatgtagtagggcgaagaaaccacaacgagttggactgaaactttttaaatttttggtcttcctggttggtgccgtcctgcttggcagctgttctgctgtttcacaccaagaaaagttgtttctgaacttagtttacttttttcccaagttaaaagtagcttatatattctgcattttgttaaggagcttgcactttatccaaagggcaggacgaagctgatctgagacaggtgtattagttatttcttgcttcctgacaagtcaccccacactcaggggtgtaaacagtaacatctgtcagctcagaaagcctctgtgggtccggagtctgtgagtggcttgggcacgcggacctggcccagggtctcctgtgaggtcacagtgcagtgttggccaggctgtcatctgaaggttggtggcttcaagatggctccctggcagggggttggcaggaggccttggttcctcacctgggggcctctctgtggggcagcttcagtgtcgcccagcatgactgtggcttcctcccagcagggatgggattgcacagctggtcgacggtggttgggagagggagaaatagaggcccttgctcaggtttctgagttcaaaactgtgctctcatttcaggggccagcagcctcccccgatgggtcgtcagcaacgagggtgcctcaggatgtgacgcagggccctggggccacaggtggaaaggaggacagtgggatgattcccttaggtgagctgctggcctctctggttctccccgccagcccccagcaccggggagggggttcagtgaacgatcctggcaccaggacccaggacaaggacagacttggaccccagcccttgaggagccccggggttcggacccaaggggcgggcattgggggtatgggtgggcctcggggttggaggttcatccatccatctatccatccatgcacccatctagccatcatccaccctccacctatccattcctctatcatatacccacccattcacccatccatccctctatcattctcccaggcatccatccatccttcacatgttccccctcacaccaatcccaccatccctctgtcatccatcatcatcacccatctatccatgacccacccatccatccatctactcatccacccatgcacccacccatccatcatctgtacattcatccacccatcatccgtccatccatccacccatcatccacccatgcattcatcatctacccatccatcacccatccgtccatctagtcatccacccacccatccatcatctgtacattcatccacccatcatccacccatgcattcatcatctacccatccatcacccatccgtccatctagttatccacccacccatccatcatctagacattcatccacccctcatccacccacgcattcttcatctacccatccatcatctgtacattcatccatccatcatcggtccattcatcacccatcatccacccacgcattcttcatctacccacgcattcatctacccatccatcatccagccagccatcatctattatgtattgggcattgactgtatgccaggcactactaggtaccgggacacaggtatgaataagaagcccacagcccagccctcttcccaccccaatggtttctgcctttaagcgttccctccctgcctccaccccagcctgtgctgtccttgccccgccctcgtgccgacccagatgctgactctctttcttttcccagcaggcaccgcccctggggctgaggggccggcgcctggggactcccaggctgtgcgcccctacaagcaggagcccagcagccccccgctggcgcctggcctgcccgccttcctagcggccccgggcaccacgtcctgccccgagtgcggcaaaacgtccctgaaaccagctcacctgctgcgccaccggcagagccactcgggcgagaagccgcacgcctgccctgagtgcgggaaggcctttcggcgcaaggagcacctgcggcgccaccgcgacacgcaccccggcagccccggcagccccgggcccgcgctgcgccctctgcccgcccgtgagaagccccacgcgtgctgcgagtgtggcaagaccttctactggcgcgagcacctggtgcgccaccgcaagacgcactcgggagcgcggccctttgcctgctgggagtgtggcaagggcttcgggcgccgcgagcacgtgctgcgccaccagcgcatccacggccgggcagcggccagcgcgcagggggcggtagctccgggcccggatggtggaggccccttcccgccctggcccttgggttagccgcctcccggccagcgccatctcccgcccttggtgctgcccccgggcggtacctgctctctcccagcgccacttggcctcttcctctcctccttccctcccatcgtcctcctccacctgcgcctcccttgtctgaacttcccaacgccttcctattcctttccaactccttttcccccaaatttcactttccttctcaggtctcacctcagccccccccttctccctgatttctcggcctctctctctgtgtgaaggggcctctccctaatgtctcctccttcccccctcttctctctcctgcggcccagcctccctctccctcctccattcctctctccctgcccttttcctgcctgaagagcagaggtgaggacctgggacccctgaggggcaggccaggaggagctcgggcgcaggccaggcccccttggtgaagcagaggctgaaggaaaggggtctgggtcttgtccctaggaattctcctccctcaggagattgggggttgggggaggcagcgggtgatggctctgaagctgaacccagggcctggctgtggtcttcttggtcttgctgccccctgtgacccaaaggcatgggatggacagagatgcctgcccccgtgaagctggttggggagggcagttcaccagcatccatagagtaataaagtcactgtgtgtagacccggagtctgagctctgtctggagtctgtccggcacagccaccctcccagggccgagcgtctggggtgcccggggcttctggggtcagctgtcttggctcccaccacagactctcttggcatgagagaggctctgggagtctgggcacagctgtgggaggcagtgcaggaaatgtgtcctcaggagggctgtccccacctccatcctacggaggcagggatgaggctcctggaagggacctgccgagtgccacactgagtcaggttcgcatctgagcccttcagcttcctggctgggaacctacaggttggtcataccctctgggcatgagttccacatccgcaagtgatgataatggcacccacctcccttgctaaggccactctgtttgactggggtcctgagtgtcagtgttggtaggtcttgggtggcccattctgccacgcaaggaattctctcacctttagctggagccattggccgagggggggactccgtatggagggcaggctttggccagctgcatctttccaggatgccacctcttgtcagctcagcgagcaaccccggttccttctctccagagaggaaatctgtagcctctgccgggtggatgaagggcagttgccgggctttggaaagcgtaggatgagagcgctggtctgaccactcccctgccgcccagtcttggggctggcttcaccctggtccttttggttcctgtgtgcccagcgcctgagcctgggaggggttctatgtcaaaccctccatggttgccgccttgtggctgagcccgccacggtaccaccttgcgtccaagcccccccacggtcactgccttgctctctgcttcagcttctggctcagtgtcaagggctggggcaggtacagcctgtgccgggctgcgagggcatctggaaacagccacctggacggtccagtgcacatcactggagtctaggtctgccttcaagactcaacagtgcagggaagggtttaggtgccaggctatccaggaagggcaagtgaccacaggcctcagcacccacctcctaagacaggactggtagtaatgcccctcctgaaaagggactgtttttgaaaattaaataaggctgggtgcagtggctcatacctgtaatcgcaacactttaggaggctcgggtgggtggatcacttgagctcaggagttcaagaccagctcggctaacatgctgaaaccccgactctactgaaaacacaaaaattagccaggcatgatggtggacacctgtaatcccagctactccggaggctgaggtgggaggatcacttgaacccaggaggcagaggttgcagtgagctgagatcgcaccactgccctactccagcctgggcaacagagcgagacttcgtctcaaaagaaaaataaggtaatgaatgcagaatacttacgggaacttggtgtgtgatctcagcctgctgctttcacactgacaggtgcatgttaaggacgttaccatgcccaccgtgtggggaagaagacgggctgggagaagccgtgtcgtctgctgcagactttcaggaagtgactaagaggcatgagagggagtatgaggtggtgtcaggccagggtctgaggacagggttctgataacagcaaacacagagtgagtctgctgggccagacctttttaaaatccagtttgtttatcatcataaccaaccgatgaggcatgcactgttgttatccccatggtacagatggggaaactgaggcaccaaaagagtaagggaccgggccacatctgtggatctcatcccaggtgtctgggctcacagtattcactccagctcctaacagcacagctgctgcttttgcccattcaggctccatctcttctcttctgaaaagcctcccgggacttctgtgcccctttggggacccctccaacacacacacacacacacacacacacacacacacaccccgtgtctggtctcggagggacagtcggccaggctgtcctgccccactcttttgtgtcactcaagatggacagtcccggatggattggaggatgctggaagaacacccctgcaaaggactagaaacaaggcgagaccagatagatggagatctgactcccgcaccctcctgcacccacacctgctaagcctgggggagctttggtttgacatccgatgacgagtggtgtctgcctccgaggctgtataacggagtggaggatgatcccccccaaacaggagggaaattctggaaggccgaaacaaaacttgaatattctccgcatgggcaacagaaaactttccagagagacaacctagcagtccttcctcagagtgggcggtacttccacgagagtgcgcagcctttcctcagactgcgcagtccttcctcagagtgcacggtccttcctcagagtgggcggtacttccacaagagtgctcagcccttcctcagactgcgcagtccttcctcagagtgcacagtcctttctcggagtgtgcaggccccagccagacagactggcacaggtgcatccgcagaaggtcctgcatagcgctgttcctcatggtgctgcttgggatggcagagaatcagagcaacgtaaatgtccgttactaggagagggggaacgaagaaacattgttcaggaaaagtaccgaaacgtggaagtaggcaaaatgtcaattgtgcagccttctaaaatcatgctcaattgtcttaaaaatagtcctgcctgggccgggcactgtaatcccagcactttgggaggccgaggtgggtgcatcacttgaggtcaggagctcgagaccatcctggttaacatggtgaaaccccttctctactaaaaaaaaaatacaaaaattagccgggtgtggtggcgagcacctgtaatcccagctacttgggaggctgaggcaggaagatggcttgaacctgggaggtggaggttgcagtgagctgagatcgcaccactgcactccagcctggatgaaagagcgagactccgtctcaaaaaaaaaaaaaaaaaaaaggaaagaatagtaaggaaataaacccaacagctctccccaccaatatccactctgatggagcaggtgccatgagggctgtcctgtgactgatacccaccatgtctgttggacactatcacatctacgatctttatccatcaaccccaataccacagaccagagaacatctgaattgtggttttggatgctggccttgactttcttgcttccgtctttattgcttgaggggtgagattgttttaagaacctgctggtggcatgaggtgatttttttttctgcttcctctcctgggggccctggcaccaggggctctgccaggacccagcaggggttagttaattctactcaatttccctgggtgactgcccctcccctcaccccttcctctcccctgctaaagggttccggctctggggttccatacaccaggttcaaacctcaactctgcttcttccttgctgtgggaggaggtcgatgataggagtatcctggtccaagccgctccagtcctggtctctctcacaggtgattgctaactgggtccccaatccataaaagttagctgggtgtggtggcacatgtctgtaatcccagctgctcaggaggcttgagtcaggagaatcgcttgaacccgggaggtggaggttgcagtgagccaagattgcaccactgcactccaacctgggcgatagagtgagatcctgtctcaaaaaaaaaaaaaaaaaacaactagaagtttcctgatggggtggtccctgtctacctcgtaccctccaccctccccagttagtctgcattccaggtccagctcatcacccagttccttcagcccttccttcctccaccccactacaggacttttgcacaggccattggctccacatattaataaaatgttgttctttcttcctgcatttgcctagtgaacacaagagcaaaactccatctcaaaaaaaaaataaataaaaaataaataaaataagggcatgaatcccattcacaaggatgaagccctcatgatgtgatcatgtcccaaaagtcctacctatttactatctattgtctatctatctatctatctatctatctatctatctatctatcgttatatctccatctgtccatccatccatccatccctagactgctcaacagacacgctacctcttaatattctcacgttgggtattagttttcatcatatgaatcttcaggggactctaacattcaatccataacatgggggttacagtgagggctaaatggggggagtccacaagtcatgctcacgcctgtaatcccagtgcttaggaggccgctgcaggctgatcacttgaggtcaggagtttgaggccagccaggccaacatggtaaaacctcatatctactaaaaatacaaaaattagctggtgtggtggtgctcaactgtagtctcagctactaagaaggccgaggcaggagaatggcttgaacccgggaggcggaggttgctgtgagccaagatggcaccactacactccaggcttgggtgacacacagcaagactccatctcaa[136 bp omitted]atggtgaaaccctgtctttactagaaatacaaaaattagccgggcatggtggcgggcgcctgtaatcccagctactcgggaggctgaggcaggagaatcacttgaaccgggaagctgagattacagtgagccaagatcacgccactgcactccagcccgggcaacacagccagactctgtctcaaaaaaaaacaataaaaaaaaaccccaaaaaatcattaaatattcacgattttgggggggcagtggtgagccagttgttaaactgttggtatgttgaaattggccctaatggaatatttacactatgggaattggctaacagtacaaatgcaggcatttattttattttattttaaaaagctgacattggctgggtgaggtggctcacacctgtaatcccagcactttgggaggctgaggtggatggatcatctgagactgggagttcgagaccagcctgaccaacgtggagaaaccccatctctactaaaaacacaaaattagccaggtgtggtggtacatgcctgcaatccccagctacttgggaggctgaggcgggagaatcgcttgaacctgggaggcagaggttgcagtgagccgagatcgcgccattacactacagttacttgaatgacagtgactctgtctcagaaaacaaacaaacaaacaaatagaaaaacacagaaatctagatctttatgtaaaagttttgaaaccctatatgctcgtgattcgatttgcaattttcaaaacactgtgtggaagtttagcccagtgtggcaagcacacgcctgtagtcccagctacccaggaggctgaggttggaggattgtttgagcctgggcagtcaaggctgcagtgaaccaagatagtgccaccgcactccagcctgagcaacagagcgagaccccatctcaataaaaataaaataaaataaataaataaataaagcaagcaagcaagcactgtgtgagctacaatatgaaggaaccaaaacaaacaaaaatcataatgcaaacaaacaaacccaaagcacgtctgagggtctggttttggctgcccgtttgcaagttctgagctggttcctcagtttaccaaagaggagatggaggcccagaagtctgtagtgaattccctgcagccccatagcgggccagtgaaatgtgaggttgtttcctcattgctctgagagttggcattgagtgaagatgagtccccaacccctcctctctgggggatgaagtggtagaaatggctggcagggaggctgaggttggagcaacactgacctttggaattatgggcaggaaatgtgtggggcttttttttttttttagatgaagtcttgctctgtcccccaggttggagttcaatggtacaacctcagctccctacaacctctgccttccagtttcaagcaattctcctgcctcagcctcctgagcagctggaattacaggcatccaccaccattcccagctaatttttatatttttagtagagacagggtctcaccatgttggccaggctggtcttgaactcctgacctcaagtgatcctcccgccttggcctctgaaagtgctggggttaaagacatgagccaccacgcctggcccggggtcttaatcctaactaaatacccaaccttaagcaacagcatacccatgtcctttagagggttaactgtaaccccttaatttgggttcatggtaaggaagaactgatccagggagacgatggaatattcagcacaatggacagagacatttcctccaagctgagttaggggaaagaaaggtgcagacttccccgcccccagtgctgacctcccatctcaggtggggaagagaaataaagcttttgtacacgttttttttgttttgttttgttttgagatagagtctttctctgtcgctcaggctggagtgcaatggtgagatcttggctcactgcaacctctgtctccctggttcaagcgattctcctgcctcagcctcctgagtagctgggattacaggtttgtgccaccatgcccggctaatttttgtatttttagtagagacagg[143 bp omitted]cctcccacttttcattgtttcgtttagtgtatagatggggaattctttggtgagatgcaaagacaaatataggtttacattttgacatcttaggagttttttgtttttgtttttctgagacaggatctccctctgtctcccagactggagtgcagtggtggcatcaaggctcactgtagcctcaacctcccaggctcaagcgatcctcccacctcagcctctggagtagctgggactacgggcacatgtcactacacacaactaatttttgtatttttttgtacatggggtctcgctaggttgccaaggctggtctcaaactcctgagctcaggcaatttgcctgccttgaactcccaaagtgctgggattacaggtgtggaccactgcacctggctgttttttatgaatggcgaactgctggatgacacagaatgtgggcatggatttttaaagcctgcctagctcacaaggggtaaaatgtgtctatttaggaagatatgcccattgacatctgaacaccgaaaaacacctccatgctgtagcccttcctcaaaccattatgatacccagagttattaagaaagatgcagcctcccacagttacatcaacatcctactccaactttccatggagctcattttattttacttttcattttttccaaacctactgtgttgcaggttcttttttttttttttttttttttgcgacggagtctcactctgttgcccaggctggagtgctgtggcatgatctcggctcactgcaacctccgcctcctgggttcaagctattctcctgcctcagcctcccaagtagctggaattacagatgtgccaccatgcccggttaattttttttatttttagtagagatgagggttcgccatgttgagcaggctagtcccgaactcctgacctcaagtgatcccacgcctcggcctcccaaagtactgggattacaggtatgagcctctgcaccccatgagagtagattttaaatgctttcagtacaaaacgatgtctacgagctggtggatgtgttaattagcccaatttaataattttacagtgtatacatagatcaaaacattatgctgtatgccataaatagattcaatttgtatttgtaaatttaaaaaaattttaagaaaaaaataagcaaatacataaataagtaaatagacatatttttaaatggtggtcataataaatgtccctgagaagaggataggaagtcatccacacgtagctggcaagaacattccaggcagagacaatggcagaatgcactctcttttcccactcttgtcaacattctacctgcttttcaatttaactaatatca[132 bp omitted]aaccccgtctctactagaaatacaaaaaaaaattagccgggcgccgtggcgggcaccagtagtcccagctactcaggaggctgaggcaggagaatggcgtgaacccgggaagcagaacttgcagtgagttgagatcgtgccactgcagtccagcctaggagaaagagtgagactccatctcaaaaaaaaaaaaaagaaaaaacaaaagccagctgggcacagtggctcacacctgtaatcccagcactttgggaggccaaggctggcggatcacctgaggtcaggagtttgagaccagcatggtcaccatggtgaaagcctgtctctactaaaaatacaaaaattagccaggcgtggtggtgcacacctgttatcccagctactcgggaggctgaggcacaggaatcgcttgaacctgggaggtgggggttgcagtgagccgagatcgagccactgcactcccagcctgggcgacagtgtgaaactgtgtctcaaaaaaagaaaaaaaaaaaagaaaaagaaaaaacaaaagccataaagatacaactcaggctgggcgcggtggctcatgcctgtaatgccagcactttgggaggccgaggcagacggatcatgaggtcaggagatcaagaccatcctggctaacatggtgaaaaaccctgtctctattacacacacacacacacaattagccaggcgtggtggtgggtgcctgtagtcccagctactcgggaggccgaggcaggagaattacttgaactcgggaggcaggtgttgcagtgagccgagatccagccattgcactcccagcctgggcaacagagtgaaactgtgtctcaagaaaaaaaaaaaaagagaagaagaagaaagaaaaaacaaaagccagaaagacacaactcagcccaccaacatgggagagcatgtcatttcccacctgggcgcctccggtgtacactgtttcccgctttccttctgattcaaggtcacgggaggctgctggctgcttctgcactcttgtttttgtaactggatgtccgggacctttggaaggcgaaggcacctgcttatttcatctcctccccaccgttgtcatgggccaaactccaggatgtccttccgccctggttagctcccgccatgagtcagccctctcctctccacgtgcccccacttgaaccactcctgtgaatgcagcgtcagcatcgatgatgtatttcacatgcagctctcagctttggacattgcgttggctccccttcactctgactcaccttgactctgcacagaaatgctcctgggagagaacgctgacacttctcttcctgactgcagattcccgtcctgtggccgcttccacatctgaatctttccaatagtgggattttcagcctcacccacccatgcctctttgaaaagctaagaatgcaacccctcttgttcaataattcagttaggtgtttctagcacatgaccaatacttaggtcttttccagcccctcccatgaactttccctaaaaaatgtaactttctcaagtaaaatgggaatctttctgtggtgctggtgggactgaaaactggtatgtgattgtcgaaaggcaatctggatgtgtatactaagaatcccagaggctgggcgtggtggctcacacctgtaatcccagcattttgagaggccgaggcaggtgcatcacctgaggtcaggagttcaagaccagcctggccaacatggtgaaaccccatctctactaaaatacaaacaaattagctgggcatggtggcaggtgcctgtaatcccagctactcaggaggctgaggcaggagaattgcttgaacctgggaggcagaggttgcagtgagctgagattgtaccattgtactccagcctagggaacagagcaagactccgtctgaaaaaaaaaaaaaaaaaaagaatcccagaatggttataccttttgactgagttgcttttcttctaggacttaaacctaaaggattcgtcagaaatttgtaggaatggcactaaaaaggagtgaactgttgacacacaccacagcgtggatgaatctcatgcactaagtaaaagaagtcagactgaaaaggctgcacactgtaggatccagtttgtataacattctggtaaaagcaaaactttgtttttattttatttttacttttgagatggagtctcgctctgtcacccaggctggaatgcagtggcatgatctcggctcactgcaatctccacctcctgggttcaagcgattcttctgcctcagcctcccaagtagctgggattacaggtgcacaccaccacgcccagctaatttttgtatttttagtagagacggggcttcaccatgttggccaggctggtcttgaactcctgacctcaggtggtccactcgccttggcctcccaaagtgctggggttacaggcgtgagccaccgtgtctggcctatcacaaacattttttaaataacaaattagaaaaacacaaccacaaggaaactgtgggatgtggtgatggtgtcagggacgtttgtgtccacactcgtcacatggtaacattacgtgcgtttttggtacaccaattatacctcaataatgtggttttgaaaataaatctaactcaaatggcttaagtgtggcagggagcaggaagcgcagaggtgggggccgccaggctcccaggcccagctcccggtgtttcccaatgcctggggctcagctgcggcctgggctttacgccccctcctggcgacagaagacatagcggctccccgacttcaggcttctcccacaacatccaggaagggaggaagagagaggagggggagaaggaatgggggcaaagggagaggggaagcgggagacagaccagagaaatgaaatgtggtgaaatgtaagcatttggaaaatcagagtatctgggaattctttgggcaactttcctgtaagtctgaaattacttcaaaattaaaaaaaaaattaagggttgggcgcagtggctcacacctgtaatcccagcattttgggaggccgaagctggaggatcacctgaggtcaggagttcaagaccagcctgaccaacatggtgaaaccctgtctctactaaaatataaaaattagccggccatgatggtgggtgcctgtaatcccagctactcgggagggtgagacgggaaaatcgtttgaacccgggaggtggaggttgcagtgagctgagatcacaccactgcactcccgcctgggcagctgagcaagactccgtctcaaaaaaaaaaaaaaaaattaagggccaggtgcggtggctcatgcctgtaatcctagtactttgggaggtctcgacaggaagatcacttgagtccaggagttctagaccagcctgggaaacatagcaagactcgatctctataaacaaacagaaaaacaaaaattaaccggttgtggtggcacatgccggcagtaccagttactcgggaggctgaggtgggaggattgcttgagcccaggaggtcgaggctgcagtgagttatgattgtgccactgcactccagactgggtggcagaacaggaccctgtctcaaaaaaaaaaaaaaaaagaataaatttttaaaataaataaaaacaaaaagtaaaaaaattgaaaggaaactccaaggggaaaaaataagtttaaaaagaacaaggaggccaggcacggtggctcatgcctgtaatcccagaactttgggaggccaaggtgggaggatcgcttgaggtcagtagttccagaccagtctggctaacatggtgaaaccgtgtctctactaaaaatacaaaaatcagctggatgtggcggcacacgcctgtagttccagctacttgggaggctgaggcaggagtatcgcttgaacctgggaggcagaggttgcagtgagactccatcttaaaaataaacaaataaataaaagagcaaggaagctttgtttttagtttcttttcagaagttccccagcaaatgtcttttctactctccctggctggaatggattgtacacaggaacctggtacatgtgggcgccaaggtacctacccacactgaaggaaagagagagggaaggatctgttcagatcccagtctccttctcacccctaggccaggcatagagtccacaccctcatggcatgtggggcgcctggaggagctgcaggcatttaactaaaagccagccagattcatctccagccagagccaggtggatgctgggtcagaaactgcagcgtcctctgaaggaaagggtgctcgtgtctgtagcttgcatttactaagagggacacagactcagttacagaaatgagaagaaagatggccgggtgaggtggctcacacctgtaataccagcattttgggaggccgaggagggcaaatcacctgaggtcaggaattcgagaccagtctgaacaacatggtgaaaccccatctctactaaaaatacaaaattagccaggcttggtggcacacacctgtagtcctagctactggggaggctgaggcaggagtattgcttgaacccaggaggtggaggctacagtgacaagagattgtgccactgcactccagcctgggtgacggagtgagactccatctcaataaaaaaaaaaaaaagaaagaaatgagaagaaagtgacattgtgacatttcttgcaccacatttgagttttgcgtgtgtgtgtgtgtgtgtgtgtgtgtgtgtgtgtgtaagagagatagagcaagctttggacctaccccgtttacttttcacaaactagctaatgggcagtgaggcaaggacttcccactgtttctctgaccctccattgggctccaggtaacccagcttcaagctctcagcgtcgcctcctcagtcctgtctcccgtgcagtgggcgtcactccctcctcctttctccttcccagcaaagccattcacaccttcttgtcagtttgtcttctataaaagcttccccctcctcctcctcccctgcccactcctcctcctcctcctcctcctcctcctcgttgttgtcatcctctggatgagaagtgagggacttggagaaacagcggagggggctcaggagcccaccagggtgtctgtaatcccccacgtcgtcttctcactccatccctctcctggggtctccctttccccttgggatgagaaaggatggggtaagggctgatggggatgtgtaaagacaggacagagatacaagtgccagccacaaaccgacagaatgctggaaggaccttggaggcaatgtgtcctccacggtggagaggaggagacagaacccagccaggaccagggcgtcccctctgtcccttagacagcaaagggcaacagcaagagtaaaacctcttccaaggttctttcctctggaaagcaggtgacgtcagggcaaagagagagcgtgctgcagagacagatagatcaacacacatgacaggagagagacgcagcaacgacacactccttattcgttcacccaacaagtattgagtgagctccgggcactgttttaggggctgctgtgaggtttctcatctttggagctattgactttcggggctgggtccttcccatcggggaggcctttcctgagcactgtgggaggctgagccgcgtccctggcttccacccacga[133 bp omitted]ccaacatagtaaaactccgtctgtctctactaaaaatacaaaaaattagccgggcgtggtggcgggcgcctgtcgtcccagctactcgggaggctgaggcaggagaatggcgtgaacccgggaggcacagcttgtagtgagccgagatcacagcactgcactccagcctgggcgacagtgcgagactccgtctcaaaacaaaaacaaaaaaaacgaacaaacaaaactgtctccagacttggtcacatgtcctggggtgaggctggggcagcatcggggcagagtcactcctggttgagagcttccggcctagggacgcagccatgaacaagacacagttgacacccctcatggggtctcctttagccagggtggtaggtggggggcggggagatagacagctcacaagtaaacaaataaacagggtctaccgtgcaagacagaagaaatgcaactcagtgagggagctgcggaggcttggagggattgatgggggcagaggggacagggctacggagacaccagtggcaggtggagacaaccaaggaagacacaggtcaaggcccagacgcagataagagggagggagggagccctcgaatagctgcaaagtctggaacaggacagctggaagataaaggggcacagaaggagggggaagggcagggtctaccaggggaaaccaaggcacagcagcatttcccgcgatgaagtgtgtgttttgacctcacagaccagcgtttgaaagcccctggagtggatgactgttcccccacctccatcctcttcactccctctcccttcttctaatcccctccctttcccccctcccttctattgtctcctcagaaggcataaaagctcagggggcgtgaaagagtccaggcgctggagcgaggagccagagagagctgcggagagctgccagctgcagcggggtgagagcctaggccaggagggcagaggggcggatcccagctgcaccggggtgagagcctaggccaggagggcacagggtcggctgccagctgcagcggggtgagagcctaggccaggagggcagaggggcggatgccagctgcagcggggtgagagcctaggccaggagggcacaggggcggatgccagctgcagcggggtgagagcctaggccaggagggcagaggggcggatcccagctgcaccggggtgagagcctaggccaggagggcagaggggcggatcccagctgcaccggggtgagagcctaggccaggagggcagaggggcggatcccagctgcaccggggtgagagcctaggccaggagggcagaggggcggatgccagctgcagcggggtgagagcctaggccaggagggcagaggggcggatcccagctgcacgggggtgagagcctaggccaggagggcagaggggcggatgccagctgcagcggggtgagagcctaggccaggagggcagaggggtggatgccagctgcaccggggtgagagcctaggccaggagggcagaggggtggatccaagctgcactggggtgagagcctaggccaggagggcagaggggtggagggagtgaggggctcctgggagagtgatggggggcttgaagggatggggataacaggagaaaccccagcattggtggcagggaaaaggtgaggggcaggtaaggggacggaaaggtttgaagatggagtggtggaggcagtggggcagaaggcatgggcgctgggggaccaggtcggcctgatccgatgatgggggaaggagaggcttaattgcttgcacacgtccaaactcctcaagatgtgtacattaaatgtgcgccatttttgtatctcgatgatgcctccataaagctaaaaaataaattcctctgtccttatcggaaatgcacctggcccccgcttcggaaaatgactggccgctctctccttgcagcgtgttccgcagctgtaggcacctgtcgtcctgccttcgatggctcctccctccgtccccctggtcctcctcctcgtcctcttgctgagcctggcagagactccagcatccgcacctgcccaccgggtaacgcctccctaagttcctcggaaacaacagtgtccccaaatccctgccctctgggaagagtttttaaaaatgcttctggcttgtgtcaagggtcctggggaagaagctcaaatcctgaaaatatgagaagaaatattgcgtgtctctactaaaaacacaaaaattagccgggcatggtggcacgtgcctgtagtcccagctactcaggaggctgaggcaggagaatcgcttgaacctggcaggcggaggttgcagcgagccgagattgtgccactgcactccagcctgggtgacagagcgagactccatctcaaaaaaaaaaaaaaaaaagaagaaatggggtttcaccatgttggctaggctggtcttgaactcctgacctcctggcttcaagtgatccacccgccttggcctcccaaagtactgggatcacaggtgtcagccacggcacccagtctgggacgacactttgaaaacctttgatcacacacctccacagcatgggctgtagaggctgggttgagtttgaaatccgggatctgcgactttctagctgtgtgacttcagtcacattgcctaacctctctggtctctgagtggatcttctttgtccaattccagcactgtgagagttaacagttaactcggatggcaggcagctctcattatttagccaagaggattaaataattaagagatgttggtccagggatacacagtttcagttagacaggggaaataaactagatctctggtacagcatggtggctgttgttcataacaatgtgttgtatacttgaaaattgctaagagagtagatggatgttaggtgttctcaccacaaaaaagctaagcacatgacgtaatgtagagggtaattaccttgatggagtcactccgcagtgtagccgtatttccacacgtgttgtgcaccacgcctgcatttaaaatgcagtttttttctaacaaaaaaaaaaaaaagaggccagtcccagtggctcactcctgtaatcccagtactttgagaggccaagattagagaattgcttgagctcaggagttcgagaccagcctgggcaacatagtgagaacctccatctcttaaaaaaaaaaaattaactaggtatggtcttgcgtgactgtagtccgagctacttgggaggctgaggcatgagaattgcttgaacccaggaggctgagtttgcaatgagctgagatggtgccagtgcactccagcctgggcgaaagagcaataacccatctcaaacaaaaacaaaaacaagaaaagaaaagaaaaagaaaagaaatgctaacaacaacaacaaaaaaaaaaaaaaaaaaaaagagacgccggcttggcattcagctgccctgagttgggatagcagctctcctccaggttctggcttggtctttggcaagctatttgtttctttgagcctcctttttttctatataactaagggataacggaatccatcctatagggatgttcgaggagttttgacaagagctaatggctgtggagggttttctcagcgcttggcgttgtgtgaaacccgtgatgtgaattagctaattctaccccacaatcctttgcagttggttctattttgctacttcccaccttacacagtggaacactctggcttaaatattcagtgcacatcctccttaagagtctggaatctaccggccgggcacggtggctcacgcctgcaatcccagcactttgggaggccgaggagggcggatcacctgaggtcaggagtttgagaccagcttggccaacatggcgaaaccccctgtctctattaaaaatacaaaaattagctgggccttgtggcaggtgcctgtaagcccagctgctcaggaggctgaggcaggagaatcgcttgaatccaggaggcggaggttgcggtgagccaagatggcaccactgcgcttcagcctgggtggcagagtgagacgcgagactccatctcaaaataaataaataaataaataaagagtctgggatccacctgggtttgagtcccagctgttcttcttagtgtgttgcaatttgttgcaatttgcagaatctttctgggcctcaagagcctctttctttctttttttttttttgagacggaatttcgctctgtggcccaggctagagtgcagtggcgcaatgtcagctcactgcaagctctgcctcccaggttcacgccattctcgtgcctcagcctcccgagtagctgggactacaggcacccgccaccacgcccggct[138 bp omitted]ctactagggttgttggaggaagagcctctctttttttttttttttttctttgagacagagtctcgctctgtcacccaggctggagtgcagggatgagatcatagctcactgtagcctcaaactcctgggctaaagtgatcctcccacctacaggtgtgcgccaccatgcctggctaatttttgtattttttgttttgttttgttttattgagacggagtctcactctgttgcccaggctggagcgcagtggtgcaatccccgctcactgcaatctccacctcccaggttcaagcggttctcctgcctcagcctcccaagtagctgggattatgcccagctaattttttttatttttagtagagacgaggttggccaggctggtcttgaactcctgacctcaggtgatccgcccacctcagcctcccaaagtgctgagattacaggcgagagccaccacgcccggcctaatttttgtattttttgtagaggcgagatttcgccatgttggccaggctggccttgaactcctgttctcaagccatccttctgcttcggcctccccaaatgctgggattacagcatgagcaccacccccaggcttaacatatctttaaagtgtgcaacaccgtattgctggctgtgggcacgatgttgtgccatagagctctaggacttcttcatcctgcataactgaaattatacctgttgaagaacaattccccatttctccttccccccagcccccaataaccacctttctcctctcacaacagaacgctttaagctttctttccaggccagttggctttgtctcaggaagtcctcaatttcctcatcggtgcaatggggattgaaatgaacctgctccacaggccagtgggaaagtcgtatgacgacccacatcaccccggacctgtgggacgcctgccccgctttctgtctgcttgagtcttgatttctgcatctctatccagggacgaggaggctggaccctcaatagtgctggctaccttctgggtcccggtgagtgaggctgcgctcagctctccatccctggcccgagtctgcctggttgctgcaggcagtgagtttgtggcttgtaaagaccctcacccacattcactgaggcccatggatttatttgcagatctgtctggagggttagtctaagcagagcgatgggtgtgtggactctggagccagagccttgggcccaaatcccagctctgccccttgcttggtttgcaaccttgatctctctctctctcgctctctcactctttctttctttctttctttctttcttttttttttttttttttttttgacagagtctcgctctgttgcccaggctggagtgcaatggtgaatggtgcgatctcagctcactgcaacctccgccgcccgagtagtttaagcgattctcctccctcagcctcctgagtagctgggattataggtgcccaacagcacgcccggctaatttttgcatttttagtagagatggggtttcaccatgttggccagtctggtctcgaactcctgacctcaggtgatccacttacttttggcctcccaaaatgctgggattacaggcatgagccaccacacctggctgcaaccttgatctccctatgcctcagtttcctcatctgtgacagtgggtgtaatgatggcccttacatccgagaatgttgtgaggattgagttattaatagaacaatagctggtgtgtagtgggtgctgtataatgattagctgctattctttgtctctctctctccttttttttttttttttttttttttttgagatggagtttcgccttgttatctaggctggagtgcagtggcgccaatcttggctcacagcaacctctgcttcccggattcaagcaattctcctgcctcatcctcccaagtagctgggattacacgcatgcaccacaatgccccaccggctaattttgtatttttagtggagacggggtttctccatgttggtcagactggtcttgaactcccaacctcaggtgatccgcccgcctcagcctcccaaactgctgggattataggcgtgagccactgctcctggcaacttttttctcttttcctccatttgtctctccccatttctccagttgcatcttccctgggcaataggtgtgcccatggccacgtgctgcatagtgagcattacatccataaaataccgagattcccgtggtgctcaaggttggtttcagtttgagcttcattcagggaaacccaggctgcagagacagtgtggcaggagcagaaagaacgtgagatgtggacccagacctaggtgggttcaagccccagtcctgccattagcagcagggtaatttcgagcaagtgaccgcttgcagctgcacgatttccccaccggtaggtagggacggtcaacacgcaccccgtccgacagacttggtggaggcgctgcgtccggtgagccatgctgttgaattgatggacgatgtgtttcttcagttctacttaaccgaccacctgctcttgctctctccctccctacccagtcctccaccttccccaaatgggtgaccaagacggaaagagggagacagcccttgagatcctagacctgtggaaggccatcggtgagtgagcggggagttagacgtcttctcctgcgtcctcccctgcgggctctctcctggctttggaaactggtagatgtgagctccagccctcaccctgccgcttactatttggggggccctgggcaagtgatgcgtttccttcaagcttctgggccgtcacctggagccccagcttgctttaatgttcttttgttaccaacgtgaaattccgaatcctgtttgaaccatgggccccgtgttttctctgcatcagacctcacagaatccctccactttgaaatgacataaatggaataatcccatgatttagttgtatgactcagtgagaaaatgcacgttaatttcctagaagtgtctggcatatggtagaaatggaatggtttggctgggcatggtggctcacgcctgtcatccatactcaagcctccgagtagctgggattacaggcacctgacaccacacccagcaaattttgcatttttagtagagatggggtttcaccatgttggccaggctggtcttgaattcctgacctcaggagatctgcccccatcagtctcccaaagtgctgggatgagccgtcgcgcccggccttatttattttttaaacttttattttaggtttgggggtacatgtgcaggtttgttatataggaaaacttgtgtcacgggcgtttgttgtacagactacttcatcacccaggtactaagccgagtacccagtggttattctctctgctcctctccctcctccccctgctccaccctcgggaaggacccagtgtctcttgctcccgtctttgtgtctgtgtgttctcatcgtttagctcccacttgtaactacgaacgtgtgtgtgaatgttgtatttttgtttctagacgggctcccctactcccaccctccacagccctccaagaggaatgtgatggagacgtttgccaaaccagagattggaggtaaagccaggaaacacagaagagagacaccgacaggagagggggaacaaggaagtggcaggcagagcttagagggtaaaggaagaaaggaaggaaactggaaccaaccagggacctcctcacctgtaaccacagccactaccccgaccactcagcctcgactgtgaatccccatcctggcctcgactgctcccttcacctcgattccttcactgcgaatcccacctcatgttccaactctcatttcccagcctgaatctagcacttttgcaattaggaccccacacccaaccttgatctcccccagtatcactccctcaagcttagcctcagctacaacattgacgtcaaacctctcactttgacctcatggttcaatttcatttatttatttattttttggggatgaagttttgctcttgtcgcccaggttggagtgcaatggtgcgatcttggctgactgcaacctccaccttccgtgttcaagcgattcttctgcctc[134 bp omitted]cggcctcccaaagtgttgggattacaggcgtgagccactgcgcctggcctcatggttcaattttaacatcaacctctctcctaaataagatctttatttccagcattcattctatttttttttttcttaaggagtccctctctattgcccaggctggcgtgaagtggtgtgatcttggctcactgcaacctctgcctcctgcattcaagcgattctcctgcctcagccttctgagtagctgggattacaggcgcccgccaccacatccggctaattttggtatttttagtagagacggggttttgccatgttagccaggctggtatccaactcctgatctcaggtgatctgcccgccttggcctcccaaagtgctaggattacaggcatgagccaccacgccagggaccgttgtattgttcactgcctagcacaatgcatgacgcatagtaggtacttggtaaatatttgttaaatgaatgaattaaactatccaaacacagccttcagctgccaccttcccacccaatcatgagctcagcagatgcccaaaccccagcttgtcccaccttcctttagttggatgttcgccccaaccccatctccttcttcaatccttttttttcttttctttttctttttttttttttttttgagacggagtctcgctctgtctcccaggctggagtgcagtggcgcgatctcggctcactgcaagctctgcctcctgggttctcgccattctcctgcctc[174 bp omitted]gcccagctccttcttcaatcctaactcaattcctggagacgccatgtccttatttcaacagcactaattcatttcaaaagcatgtactggacaatactgggtatgatacgctccctgaattcactaatttccatcctcacctcgattacattctgactcttgaaaacacccaccatcaccatgtgccttcttaaaatgtgggc[138 bp omitted]catggtgaaacccaatctctactaaacatacaaaaattagctgggtggggagtgatagtgagaaaaaccattcaaagtttacctctttctttcccacagatctgggcatgctcagcatgaaaattcccaaggaggaagatgtcctgaagtcatagatgtcttcaaatccctgttcctatccttcttctccagctcctcctgctccctctgaaaccttttctaggtaccctatgctgagactaagatcctgaagttaaatacccaggtctcatgaagacattgtaaagcatttgaattattctaaaaaatttctggagtttcttaggttttattgattcatccttgaaatcagtataatgtgctattaatggaaccaatagtaattcgaggactagttgggagattctggggtaatcagggaatattcctgcaacacatttaaaggaattgtgttcttttggaatcatcccaattataacacgagctattgcataatacaaataaccctcttaagtctgagagtctgtgtctttatttgaaaagattcttcaaattgcgtacttactcctccatattctttcaacccacatgagtctcctcgagaagtgaggagaggcagtttggagcagaatggagagaataaaatgtttcttgtcaaacactccattttttcccttttaattagtctgggaatttttttaggggtagcagaatccaggatgatggggtcaggtgtgggactgggaaatccaggatgacagaatcaggtgagggactggggaaaatataacctattggaggcaatccattttggattattgttttgctgaaagttttactttcattttgggtttgaggagtcacaggaaaaagaaaccacagtgttacactgaggcaggggaatcgcttgaacccgggaggcagaggttgcagcgagccgagattgtgccattgcactccagcctgggcaacaaagtgagactcaaagtaattaatgaccaaaatgagtgactgagacactgtcagtctccatccatcgaggtttatgaaatcggctgtggggcacgtccagggaaaggtgagccacagacacctctgtggctgtttttctgaagttttcaggatatttactatttatacatttccttagacgggggcaggcatagaggcagaggggtgggtaggtggtgagctgaatggttaaattcctatcagtctttagttagtgcccagtaaatctacatttaaaaaaaatatatgtttctattttttatttatttatttattttaattttttttttttttttgagacggagtctcgctctgtcgcccaggctggaatgcagtggcgtgatatcggctcactgcaagctccgcctctcgggttcacaccattctcctgtctcagcctcccgagtagctgggactacaggcacccgacaacatgcctggctaattttttgtatttttagtagagacggggtc[133 bp omitted]gagtcttaccctgtcacccaggctggagtacagtggcgcaatctcagctcactgcaacctctgcctcccgggttcaagcaattctcttgcctcagcctcctgagtagctgggattacaggcgccttccaccatggccggtgaatttttgtatttttagtagagacagggtttcaccactttggccaggctggtcttgaacttccgacctcaagtgatccgcccgccttgggctcccaaagtgcaacgttttacataagataaagtgcatgtttgaaggcaaaaaagggcgtaaagggagtaaaggaagcaccaattacttagacatctttgggtaggtggaggaatgactgagctcatcttatctttgttccacgcctcagaagataagctagtaatggacattgtcagtgtggaataaaacagacctgagttttaggagctagacttacattgtagacctgaagttacaaagggtgagttcttgtttatgggaagtcagcaaagaatttccttatgaatgatttgcgggggcattcgtggatgcccggggcctcttccctttccgtggggatctggctgatgccaaatgccagcaactgctgtccaattggaagagggcgctgcctgactcagccaccaggctgacctctccttttgcataaggagtttggggaatcctgaggtttttcttcgcataatgaataagtattaatattgttaatacttattcattaatattgtaattaattataattattacaataaattacaataaataattaataagtaattaatattaattaattactattcatggcatggtggctcacgcctgtaatcccagcagtttgggaggtcgaggcgggaggatcacttgaggtcaggagttcgagaccagcctggccaacatggtgaaaccccatctctactaaaaatacaaaatttgctgggtgtggtgtcaggtgcctgtaatcccagctactcggaggcttgagacgtgaaaattgcttgaacccaggaggcagaggctacagtgagctgagattgtgccactgcaccccatccagcctgggtgatagaacgagactcagactaaaaaaataataataataaaaataataattatacagagtcaaatgtcggggattcaaggaggcagaaagcagatgagttctcgccctgctggagactcacgtccctgggagaagcaatcacttaaagtgattaagttaatacgagaggctgcagtgagatttttttttagacagggtctcactctattgcctgggctggagtgcagttgggagatcttggctcactgcagccttgacctcctgggttcaagtgattctcccacctgagcctgctgagtagctgggactacagacatgcaccgccatacccagctaatttttgtgttttcagtaaagatggggttttgccatgttgcccaggctggtttctaactcctgggctcaagtgatccgcctgcctgggcctcccaaagtcccgggattataggtgtgagccaccacacccagctttgcagtgaggttttgaagcagtgttatgtgatgggattcttttttcttatcaaaaaataatttactgggcaagtacggtgattcacgcttgtaatcccagcactttgggaggccaaggtgggcagatcacttgaagtcgggagttcaagaccagcctggccaacatggtgaaaccccatctctatcaaaaa[132 bp omitted]gaaatcctatctctactgaaaatacaaaactcagcctgctacagtggcaggcgcctgtaatcccagctactcgagaggctgaggcaggagaatcgcttggacccgggaggcagaggttgctatgagccgagatctgacactgcactccggcctgggtgacaaagctagactctgtctcaaaaataaataaataaataaataaataaataaataaataaataaattattgccttctaatatttttttagcagcccaagtccaatgattgcattaaaaaaatttgttgcatctatgccatgaatacaatatttaggcagtcatgtcagcttttcttttatttttctctttaggatagggccttactgtcacccagtctggagtacagtgatgcaatcatggctcactgcagcctcaacctcctgggctcaagcaatcctcccacttcagcctccccagtagcttggattacaggtgtgccatcatacccggctaatttttatttttatttttgtagagatgggggtctcactgttacccaggctggtctcgaactcctggccttaagtgatcttcctgcctcagcctcccaatgtgttgggattacaagcattagccactaggcccagccttacttctaatttttattcttatttttaatacatctccttttgtttaaggatatataccaagtgcctagaatatcagctgataagtgttccataaatgtctgtggaatatttgttagacttattattattttttgttattttttaaagttatttattttatagagacaaggtctcactcgcttgagcccaggttggtcttgaactttttctttacttatttttggggtggagtctcactgtgttgcccaggctggacttaaactcctggactcaagcaaacctcctgcctcagcctccccagtagccgggattacacatgcgtgccactgtgcttagtttttttcttatgagatattggaaaatgatgagactttgctcattggaagagaaacagcaacagacactaaaataaatctgtaagaaagcaacagacataatcaaacagaaaacaaaactcatgggggaggataaatatttattcaaacatccgggcaattcctaccaagtgctttatgtgtatatgtcatctggtaacattggagaaaaaccatcattcactgtctcttggggtggaggatgtggacctgactctggaatcactgggaggtggtttcccggtgtgttttcaggtgacgcttgaatgtccccagctgacggaaggccttttgacaggtgggacatttgtagggcttctctccggagtgggtgcgctggtgaacgttcaggttccccttgtggctgaaaactttgctgcagtatttacatttaaacggcctctccccggtgtggatcctcttgtggccctgtaaggtggactcgtgggcgaaccgcttttggcagacgtcacacatgtagggcctctcgccagtgtggactcgctggtgaactcggaggtctgagggctgcaagaagcgcttccgacagagatcacattgaaagggtctgtctcctgtgtgtgacctcctgtggatgcttagctgggaaaaatacttaaatgatttattgcacacgtcacatgcaaagggcggcagggccttggcttcttggccatctgggtgactgaccgggcccgcagggcctggggaatgaactggattgatctcagcttgtcctggggattctctgttgcccacaggtgtggcttctccttgaggctcttcttgggaaatggaggaggcatctggtttgcttcttttgggactgctcagattcagagcatctcctctgttcccgctgtgagtcaaagcttctctctccacaacgcaggcagaaggtgtgtcagcatccacattttccacagaggctcttttctggggttccttcccctcctttgctctcaccagatctggtggaagaagggattccacacacaacagttaacaaagccgattttcaatacaccaaactcattgcaaccaaacactgaccttggctgagaacttcccctcaacctcaagcctaagacattggactgtaggtctctggaaagtggaggagagattttggcagctgatcgccagccccaggggatgataatgctgggcccccagccccgcaccccagaagagagggactaacccctgtggatccaagtcttcatactcactgggactctttggaagctgaggctctggggatgacagtcctgggttctcttccctgttttccttcagatccttctccaaggtctgcttgggtctcggagagtttgggtcacctgttacgtcaatactcttgtgtagcagaaagtcctctccctgaagaggaaaaaccaagagcaatgactgccgtgtctatactggtggaagtagggacatgtctgtcccctcctgactggacacaccagacttcccatggaccaccccatcaccccaagtaaacatcaccacctcatttctgcgtctgtccctaatctgcaccctccatattctaaatcagctcctttgcctggcggttttcactgtttggttctctgagaatatttctccccgccgtgccaatgtctccctgcccctgacgctggaagaagcatgactctaggtggaggcccctaacccctggcaccattggcattggggctgcatcatcctcctggagggggcgctcctgtgcagagcagagaccccgcctccaccctctagatgctatcaacaccccaccacccctgagaatgccaaacaaaaatgtcctcagacattgccaaatgtgtccttaaaggcaaaatcaccagttgagaaacactcctcaaattaagaaatcaacagtctgagaaagtgggttccttgctgaatgacttcatgaaatgtctttgcggaaactggatggggtagggaccttcagttcattcatctgtgccaactgcctccctcacttcactgagaccatttcttacccacccccccaccctaaatgctaaaagctctcatggtggagagaaaagtagatgaggcttccctctctgtgatggctcaggaatgaatgtttggggatgtatcatgtccatggggaatggctctaatcttgtcctgtgccaaatctctcaatcagttctgcagccacacgatttcctcctgttccttctcccacctctgcccagacaccaaggcctcacacactcacctgcctcctggacagtgcagcgaccctgggcaggatctgctgctctcggcgggcctggcctgtccccggatgcatctggttcacagaggaggcccactggctggacacgtctctcggatcatctctgacactggcgggggcttcagccatctcgacatctgagttcagcataagatattctttgccgagcaagttgactatagactgtagagagaaaaaagacaatcagacactatgagaacctgaaagtagctctcatatttcctgggtcctgccataatgctcacactttactgtaattaatgttcaaatctaccttcctgatgcagaatcagctctgtggacacagcaatctgtctgaatttttttcttcactagataagtacataaatatgagtcatttagatgaaagggtctctaaccaaagagaagacaaggagaaatattctgggtgaatccaactcaattggccaatggcagctcaccttgtgttagaacttaggggctcatttggggacctggaggcagatccctgcatctgataccaaccactttccctgcctcaggatgggacttctgggccccccttcagttcactctaatgcctccttccctacgttccatcaggcctaatattttaccaatgtctttctttcaggttggcctcacacagtgtgtgggttcctgtatcccctctgcctgtccatctcctaggtcaggtatttgcaatattagctgtgctgatatttgagactggagaattctttggcccccatcccagctccccttccctgcaccaatcacgaggttcccactcacccatttcttgggtcttctgttatttcgtagcaggtcctccaggtctttgcagctctgcacaccgttcaccttgactaagacctggagctcctggggcatggagatcatgaactgctccatcaccagcatgtccaggatctgctctttggtgtggaggtcgggcctcagccacagatggcacagctcagtgagtttcctcagagcctggatggggtccgactcctctgggcagctgaacatcctgaaattcatgtgccaagtctcagggttcctgtcgtgatttccaagttgagtttctggggacgccacagaccgtggagtgtctgacccagggctgttgcagggtcctccctgaccccatgagagtgtccaatttgcagccatatctactggagaatatttcaatcagcctctgagcaagctcttccagtagccagtatcaaattgagacctatttacacaggctgcccctgtttcttctcagtaatatattcacagtttgttcagaagtctgcaggaaaaaagcatgagcccgattattttaactttctactccacacacccctcccttccaaatccctcatcccaatcctggaccccacttgtccatgggcatcggactcagccctgtggaaatgaatccactctgttcttctctgactacatgttctggggtaaaatctgaatgctcccctggattctgatctctaggggatcattgtgcagaggtggaactggttttcctttcaactggaacaacactgctcttgactgtaaattaaatcggatatgtatgtgaagctcctagaatctgatgtaacaataatgtcagttctttatgttttcccgtcaagacaagatccaaggcaaagcccttagtcataattatgtaaaaagctagagaaaaatattaatagttacaacctacgattgtccccaacacatttttcctgttaaccccaggatatttatttgctgcagg[308 bp omitted]aaaaaaaaaaaaaaaaatcctatgagaattaagctcctgcacagatatgtggttgtttcggtaaaacacacatttatgaaattcatcacttttactaagaacatgcgctatgttgtgcaaccatcaccactttctaattccagaatcactgcatcaccccaaaagagaacgccatccccatcaggaattacctcctgccccaaccccctcccccagcccctggccatcactaatctgcttattgtctctgggagtttctctgttccttatctcattccataaaatggattaaagtcttatgaaatttccaggtagtgggatcataccatagagcggttttttcttttttctttttgagacagggtcttgctctgtcatccaggctggagggaaatttgcagtcatggttccctcggcctcaacctgggctccagtgatcctcccacctcagcttcccaagtagctgggactacaagtgcatcaccacgcccggctaatttttataggttatttttgtaatagagatggggtttcgccatgttgcccaggctggtctcaaactctgggctcaagcgatgcgcttgctttggcctcccaaaattcggggattacaggcgtgattgcattgcagctggcctacatttttaaaaaattttatttttttatttatgttttttgaggtggagtttcgcactgttgcccaggctggagtgcagtggtgcaatctcagctcactgcaacctctgctgcccaggttcatatggctctccttcttcagcctaagtagctgggattacaggcccccgcccagctaatttttatatttttagtacagacagggtttcaccatgttgaacaggctggtctcaaactcctgacctcgggtgacatgcctcggcctcccaaagtgctaggattataggcgtgagccatcgcgcacagcccaatttttttttctttttaaatttggttctaaacatagcttcaaaaggcaaaagccactgtatgatactctccaggcatcaattatcacccaagttcaacagctatgagaacacagccctgctttcctagacacaggtgggggaagcaacctgaaggtctgcagaggggagaaaaaactggcaggagggtctcaggaaaggtcactggaagcctggagggcgagtaccccacacttcctggaaggactctgagcaagtgcagaacagagagacagccagggagacaatcggcagaggcgggagacaacccagaggaggagacaatatttacacaccacacatctcacagggctcctgtgcaaaacataagcaactcaaactcctccagagcgagaaaacacataacccactagaagggcttaaggcgcctgtgtggacatctcagatgaagacatgtgaatggccagcaggtctaggaaaaggtgctcgtcatcactcatcatcagggacatgcaaatccaaaccacaaggcacccctcacgcctgctagagtggctgttcccaaaaagacacatggaacgagtgttggtgaggattcgggggaaaggggtcctctgcgccctgtgctgggatgtaaattagagcagccgatatgggagacagtatagaagctcctcagaaaattgaaagtccaacaactgcatgagccggcaatcccgctccggggcaggtacacagaggaaaggaaatcaggacgtggactccaaaacagtgaagctctgaagtgacagacggtgggaaggtggaaaaactacctactgggtactatcctcatatcctgggtgacaggttcagtgatacccaaaacctcagcatcactcagtacactcacgtaacaaatctgcacaggcacccaccgaacctaaaataaaagtggaatttttttttaaagttatctatttttgtttttaaacttgcagcagtgtcttgctctgtcacccaggctggaatgcagtggtgcatcctggcttgctgcagccttgacttcttgggtccaagtgatcctcctgcctctgcttcccaaaattctgggattacgtgtgagccactatacctggcctacttaaaattatttttatttttatttcgttttattgatttattttttgagacagaatctcactctatcccccaggctgcagtgcagtggccgatctgggctcactgccacctctgcctcccgggttcaagcgattctcctgcctcagcctcccgagtagctgggattataggcgtgagccacccctctcggctaaattttgtatttttagtagagatggggtctcgccatgtaggccaggctggtctcaaactcctgaactcaagtgatccctatgcctcggcctcccagagtgctgggattacaggtgtgagccaccgcacctggccattaaaacttttttttaaaaaaataaaagaaataaagttaaataggtctactgcacagcatggtgactatagttcacagcaatgtaccgtatacttggaaattgctaagggagtcgatttcaagtgttgtccaaaaatgataagacagtgaggtagagcctatggcagtttgctcgatttagccgttgcacaatgcgtacacaccttgacacactatgctgtgcaccggacatatacaccattatatatttatatttctcaatttgaaagtaaattaggcctggtgcgatggctcactcctgtcaccccagtgctctgggaggcggaggtggcaggatcacttcagcccagcagtgaaccgcgattgtgccactgtgctccagcctgggagacacatccagcggccatctcgttttgtttatttattaagtaaatcgatacattttttaaaagcatacagatatgagaaaaggcagcctgaaattctgggaattaaagaggttttcccgccaggttccctaagcgcccctgctcagaaagcggagatcgaggctgaggcgggcagattgcttgagccgaggagttcgagaccagactgggcaaagcagcgagaccacgtctctatagtaaataaaaaaatgcactcgggcggtgtggtggtgtgctcctgcagccccagctaggtggaggccgaggagggcacatagcttgagcctgggagttccaggccagcctgggaaatgagcgagaccccgtctctgaaaaataaaatgaaacaaaacctaaccatgatgagaaagttaacattattactttatttttctcctttttttttttttgagacggagttttgctttgttacccaggctggagtgcaatggcgcgacctcggctcactgcaacctctgcctcctgggttcaaatgactctcctgactcagtctcccgaatagcgggtattaccctaacctctgcctcctgggttcaaacgactctcctgactcagtctcctgaatagcgggtattacgggcgcccgccaccacgcccggctaatttttgtatttttgttagagtcggggtttcaccatgttggtcagactggtcttgaactcctgatcccgtgatctgcccacctcggcctccagagtagctgggattacaggcgtgcgccactgggcccgaccgagaaagttaatattattcctagtttacagaagcacttcatcgccagtcagagttaatcatggggtgcaaaggagacccgctgccttcacaaagtctccgagaaaataaatgcatgagaaaataaacccaaactttctgaaaccaaccccccgcatgccagctccgaaaccccacagccatcgccgctggacactcacctccttcccggcttctgcctccgaccttctcggtctgggatgcgctctccaaccggcctggagctgaactgcgtctatttatggagaagcgggactccaggccgcgtttccggttccctgcgccgcgccgtgattggtttagggccacagagtccattttcgtaatcggcgttgattacatttcccactgaaaccccacccacaggaaattaatgtattaaacgtgcctactgtgcaaataatacaggttttcccgctctactgagttgtcatattgctgaagtatgtggaggcctcagaaaatatagatctgcaagttttaaccactttgggtcccctcatgccacagacagtaatatcctaacaagtaaaggacgtgttaagagctggttgacttcgcttattaaaacaaaacggaaaaagaaaaaaaaaagaaaaattcaaaatagagttggttgattaatatcaaaccagtgatttaatctcatttttaatctcatttgagcgaagctttcacacgcgaattccaagatgttgaaaattgtggacactcgttgatatgtaatgaatgtttgtgataattttttacttttttatttttttcaaaatcttggaattggcatgtgaaagctttgttcaaactaaactaaatcactgatttgatatcagccttatataaaagcagtgggaaccagagaaaggcacatggtccccactctgcattcattccaggacggtgatagggtggtttatagatacactgagggtcctacggggttccctagttctcagccccctcagttagggctctcaagcaagaaaagccttaacggtgggtgtgaattttactgtgtggatcatggagttaatgtggaatgataattaagtgctaggcaggattagattacaatttgggaagttcacaccatcagttggatgacactaatccattcaagtagtgactcattcattttaatttcagaggaaaccttctcgtctaacctttaggacaaattggagggctgttaattttacactgattctggtttaaatccttggaaaatcttaagccgcttcactctgggaacttcaaacttcttgtgactagaaccttcctgatgtgttgttttgaagatgcaataagactgggtcaataaagtgctcgatacaaggtcattttgccaaacagttgtgacaattattttctggtgcattttctcatactttgtgatattttcccttcttaaccactgag[143 bp omitted]cccgtctctacgaaaaatacaaaaaagtagccaggcgtggtggcaggtgcctgtagtcccagctactcgggaggctgagacaggagaatggcatgaacccgggaggcgaaacttgcagtgagcggagatcacaccactgcactccagcctgggcgacagaccgagacagcgtctcaaaaaaaaaaaaaaggaattattcactggaattaactgggagctgcctaaaccaccatcttcctatctgcttcccccgaatcctcccctctggaaactcacagtctatttctgtgaagtatgttgttggtattttggtagggatcgcattgaatctgtagatgtctattaatagtatggtctttttcacaatgttgattcttccccctacgaacatgtcttcccattttctggggtccgctttaatatttttcattagtgtttaacagttttccttgtggaaatctttcacctccttagttaaatttacttccagggttttggggtgtcttttgctcttgtaaatgagattgctttcttgatttttttcttgccactagttcgttgttggtgtataaaaacactactgatttttgcatatcgacttagtatctggccaccttactgaattggtttatcaattctaagagttttactggtggaggtttcagggattcttatagatgacatcatgttgttggcaaagagagacaattcgacttcctccttctgaatttggatgccctttgttcgttgctctggttgagactttcccaacacattattattaacgaaggtcaccaggctgaagtttggaaacaggtatatattgtgatgcaatcgccaggaccaagctagttaacatctccctcaactcacatagataccacgttctttccttcttcttatttgtttaattctcaattattgggctcaagcaatcctgcttcagcctccctagcagctaagactacaggcacgagccacatctggctttcttttgatatcgttttttttttttctttttgagatggagtctcattccatcacccaggctgcagttgcagtggtgcgatcttggctcactgcaacctctggcaggaggattgcttgacccaggaattatggacataaatagataatgaaaagaaaatagtcactatgtgagttgacgaatacattaattagcttgattgtagtgataattacaccatgaatagggatatgtaaacaccagcatggtgaccttagtcaccaaggacggatagaggccaggaattggagagcagcctgggcaacatagcgatacccccatctttacaaaaaagtttgttaattagcccagtgtggtggtgcttgcctgtaactccagatactcaggaggctggagcaggaggctctcttgagcccaggggttcaaggctgcagtgagctatgagttttccattgcacccagccaaggtgacacagtgagaccttggctctaaaaataaatcaatcaataaacaaatttatccacacaggtaggagatctctacaagaaaaactataaaatactgatgagaggaaatgaagagggcacacaaatggaaagatagtccatcttcataaatcggaagaattcacattgtgaaaatgaccacactattaaatagagatctacagatccaactcaatccctaccaaaatgtcaaggacattcctcatgagaacatgacatgtttcaagaggagaggattggagggaattgggtaggtagatggtggttttaggcagattctagttcattccacttaataactccatctgaactctgactcactatcaatacctcaattcttaacaaggaaaaacatcacagagtatgagaaaatgcatcagaaaataagtgtcagaactttttggcaaaatgaccttgtatcgggcactttactgacataatctggttttttgtttgtttgctttttgagatggagttttgctcttgttgtccaggctggagtgcaatggcatgatctcagctcactgtaacctccgcctcccgggttcaagtgattctcctgcctgagcctcccgagtaactgggattacaggcatgcgccaccacgcctggctaattttgtatttttagtagagatggggtttctccatgttggtcaggctggtctcaaactcctgaccttgtgatccacccgcctcagcctcccaaagtgctgggattataggcgggagccaccacttccggccaacataatcttatttaatcttcaaaacaacatgtcaggaaggtaataattccctggttctagtcacagggagtttgaagtttccagaattcagtgggttaagatttcctaaggattgaaaccagaatcagtataaagtgcacttaattgtcattccacatggtctccatgatccacacagtaaaattcataccaccattaaggcttttcttgcttgagaggcctaactgagggggttgagaactagggagcactcagtatgtctataaaccacctcccatcatcctaaagtgaatgcagagtggggaccatgtgccttcctctggttcccactgtttttacctaagagtaggttggctgatatcaaagcagtgatttagcctagttcaagcacagctttcccatgtcaattcccagattttgaaaagtgaaaaattatcactactactcattatgtatcaacaatgactgtccctttttttttcaatatcttgacattcacatgtgaaagctttccttaaactagagcaaatcactggtttgatattattcaaccaactcttaacatgtcctttactcattaggatattactgtctgtgccatgaggggacgcaaagtggttaaaacttgcagatctatagtccctgaagcctccaaatacttcagaaatatgaaatgtaattcagtagagcgggaaaacctatgttatttgcatggtaggcatgtttaatacattaatttcctgtgggtggggtttcattgagaaatgtaatcaatgctaatcaccttcaatggattctatggccctaaaccaatcatgtgggggcccaggggactggaagagaggcctggagtcccgggggttctctataaatagacagttcagctccagagcagttggagagcacatcctagaagagaggaggctggaggcagaagtcaggaaggaggtaagtgtccactggggatgtctgtggggttttggagttggcctgcaggggttggtttcagaaagatttggattgaggggttggtttcagaaagatttgggttggggtgttggtttcagaaagatttgggtttattttttcatgcatttgcccggacaccttgtgaaggcagtgggtctgctttgcaccctattatttattctgacttgttatataactctcccttaaaataggaataatattaactttctcatcgtggttaggctacattttattttttagagatgagatctctctcattgcccagactagactggaattcccggactcaaacgatccgcctgcctctgcttcccaagtagcaggaactacaggcacttgccaccatgcctgaataaatgtttaattttttttgtacagatggggtctcagtacattgcccaggctggtcctgaactcctgggatcaagcatgctcccatcttggtcttccaaactgttggaattacaggtgtgagccaccttgctggccacacaccacttgttaaaaagcatcgctggattctccctttccacagggtaaaatcagccattgatgaatgggcatcaacctactaggccaatgagaatctgcactaagtgtccctacctgggggtcctgtgtgctgtatactcccagaattgaatactaacccgcgtacctgcctttattttttcccatgtcccattgcttgttttaatgggaaatgaactgacagcgaatacaaagtggtttctaggaacatgaacccctttttttagagacaggctctcactatgttgcccaggtggttgtcaaactcctgggctcgagggatcctccctcctcagcctcctgagcagcagcaggtgccctgtggcaaaatcatttttaattccagaatttcaggctgccttttctctctcatatccatatgctttttcaaaaaaaaaaatttacttttaaattgaaaaacaagaaagatacgtatttatggtgtacagcataatgtgctttgcaggatagaaacaatgtaaaatgggtaaattgagctgatattcacatgccttactttatggactaatcatttttggtcatgaggatgcttaaagtctactctttaagcaatttccaattatacaatacattgttatgaactgaagtcaccatgttggacaattgctctcttgaactgatctcttcaactgaaattcatacccttaaacctatatctccccaaccctcaccatagccctgttaaccaccattctactcactgctactatgagtctactgggaatttttttttttttttttttttttttggtgacagagttttgctcttgttgcccaggctggagtgcaatggcgcgatctctgttcaccacaacctctggctcccgggttgaagtgattctcctgcctcagcttcccaagtagctgggattacaggcatgtgccaccaagcctggctaattttgtatttttagtacagacggggtttctccatgttggtcaggctggtcttgaactcccgacctcaggtgatccgcccatctcagccgtccaacgtgctgggattacaggcgtgagccaccacactcagcctgagtccactaggtttttaattattgtttacattacctacttcttttattttaaaaactattttataatttcaagttttattttaaatttggggtgtacctgtgcagatgtgttacatgagtatattgagtgatgctgaggtttgaggtatgactctacccatcacccaggatgtgaggatagcaaccaataggtagtttttcaaccctccctccctctatccctccagagtttcactgttttggagtccacgtcctgatttcctttcctctgtgtacctgccccagagcgggattgccggctcatgcagttgttggactttcaattttctgaggagcttctatactgtctcccatatcggctgctctaatttacatcccagcacagggcgcagaggacccctttcccccgaatcctcaccaacactcgttccatgtgtctttttgggaacagccactctagcaggcgtgaggggtgccttgtggtttggatttgcatgtccctgatgatgagtgatgacgagcaccttttcctagacctgctggccattcacatgtcttcatctgagatgtccacacgggcgccttaagcccctctagtgggttgttttctcgctctggaggagtttgagttgcttatgttttgcacaggagccccgtgagatgtgtggtgtgtaaatattgtctcctcctctgggttgtctcccgcctctgccgattgtctccctggctgtctctctgttctgcacttgctcaaagtccttccaggaagtgtggggcactcgccctccaggctaccagtgacttttcccaagaccctcctgccagttttttctcccctctgcagaccttcaggttgcttcccccacctgtgtctaggaaagcagggctgtgttctcatagctgttgaacttgggtgataattgatgcctggagagtattactcagtggctcttgcctaatgaagctaggtttaggaattaatttttaaaaatcttattattgtatcaacccacttctttaaaatatcaaagagcactagactttaaatccattttctgagatgagattaggaatagagaaacccttagagacagaaggtagattagtgattgccaggggctggggtgggtgggcaggcggtgatcactgatgaggatggggttccttttagggtgatgagataattctggagctagaaactagacagtggtaatggttgcacaacatggtgcatgtcttagtcccatgaaattgttcacctgaagagggtaaaaatgatgaaattatgaatgtgcatttcaccaaaataacaaaatatctgtgtaggagcttaatcctcataggattctttagtgctgtcccttctctggagcgaataattctgggattaagagggtttgttgtgggacaatatcttacgttgtaactatttttatttgtcttattgcataattatgactaaggatttgccttggatcttatcttgataagaaaacataaagaattgacatgattgttatatcagattttaggcgcttcacattcctgtcctattttatttacagtcaaaaacaatgttgttcgatgggcaggaaaaccaattcagcctttgcacaatgatcccctagagatcagaatccaggggagtattcagattttactccagaacatgtggtcaggtgtagacactggaagaataacagagtggattgatttccacggtgctgagtccaatgctagaggggaagtggggtctgggattgggatgagggatttggaaggatggggtgggtagagtagaaactttaacagagctcatgctttttttccctgcagacttctgaatgaacagtgaatctattactgagaaaaaccaggggtggcctgtgtatataggtcgcaattagacaccggcttctggaagagctttcccagagacagattgaaatattccccagtagacatggctgcaaattgcacatcctcatggagtctaggagaatcctgcaacagccctgggtcagagccaccacagtccatgccatccccagcaactcaacttggaaatcatgacagtgatcctgagacttgtcacgtgaacttcaggatgttcagctgcccgaaggagtcggaccccatccaggctctgaggaaactcactgagctgtgccatctgtggctgaggcccgacctccacaccaaagagcagatcctggacatgctggtgatggagcagttcatgatctccatgccccaggagctccaggtcttagtcatgatgaacggtgtgcagagctgcaaagacctggaggacctgctacgaaataacagaagacccaagaaatgggtgagtgggaccctcgtgattggtgcagggaaggggagctgggatgggggctgcatggtgcagctggactcgagaggacccgaggggctgctctaggtcagggcttccaagtagaggagagtttgcccatcagggacacatggcagtgtctggggacagtttttattgtcacaagggggaggacaggagacgctgctaagcattctccaaagctcaggacaacccatcatgacaaataatcttccagattccaatatcagctgtgctgagacggcaagttcctggtgtaggagatggacaggcagagggggtacagggacccacacactgtgtgaggccaacatgaaagaaagacattggtgaaatattaggcctgatggaatgtagggaaggaggcattagagtgaactgaaggggggcccagaaataccatcctgaggcagggaaagtggctggtatcagagattcagggatctgcctccaggtccgcacatgagcccgccatcagccaattgagttggattcacccagaatatttctccctcttttctctttggtttagagaccctttcatctaaaggactcatatttatatacttatctagaaaagaaaaaagttcacacagagctgattctgcatcgggaaggcagatttgaacattaattacagtaaagtgtgagcattatggcaggacccagggaatatgagagctactttcaggttctcatagttagtctgattgctttttttctctctatagtctgtagtcagttttcttggcaaggaatatcttatgcaggaatcagatgtggagatggctgaagcccccgccagtgtcagagatgatccgagacacgtgtccagccagcggacctcctctgtgaaccagatgtgtccggaggaaggccaggccagccaagagctgcagaccctgcccagggtccctgcactgttcaggaggcaggtgggtgtgtgaggccttggtgtctgggcagaggtgggagaaggaacgggaggaaatcgtgtggccactggactgattgagagatttggcacaggacaagattacagccattccccatggacatggtacatccccaaacattcattcctgagccatcacagagagggaagcttcatctacttttctctccaccatgagagcttttagcatgtagggtggggggtaagaaatggtctcggtgaaataacggaggcagttggcacagatgaatgaactgaaggtcccatccccatccagtttcctcaaagacatttaatgtaataattcagcagggaactcacctcctacagattgtcaatttcttaatttgaggagtgtttctcaactggggtgattctgcctttccggacacatggccatgtctagagacatttttgttgtcattgtagggggtggtggggtgttgatagcatctagagggtggaggcggggtctctgctctgcacaggagcgccccctccaggagggtgatgcagccccaatgccagtggtgccaggggttaggggcctccacctagagtcatgctccttccagcgtcaggggcaaggagatgctggcacagcggggagaaatatgcccagagaaccaaacagtgaaaaccaccacacctgtgtcattagaagagttggtgcatccagtcaggaaaaagcagacatgtccttccaccggtttaggcatggcagtcattgctgttggttttccattctcaggaagaggacttcctgctgccagagactactgtcatgaaaggtgacccaaaggctctgagacccaagccgaccttggagaaggacctggaggaagacagggaggagaacccaggacttacatccccagagcctcagcttccaaacagtcccagtaagtatgaagacttacacctgtgtggagatagcccctctcttctggggtgtggggctggggtcccagcattatcatgtctgggggagttggcactcagctgccaaagcctctccatcccttactctccagagacctacagtccaatgtcttaggtttaaggttgaggggaagttgtcagccaacatcagtgtttggttgcaatgagtttggtgtattgaaaatgcaccttattaactgtgtgtgtggaatcccttcttccagcaggggtggtgggagcaaaggaggggaaggaaccccaaaaaagagcctctgtggaaaatgtggatgctgacacaccttctgcctgcgttgtggagagagaagcttcgactcacagcgggagcagaggagacgctctgaatctgagaggtctcaaaagaagcaaaccagacgccacctccatttcccaagaagagcctcaaggagaagccacacctgtgggcaacagagaatccccgggacaagctgagatcaatccagttcattccccaggccctgcgggcccagtcagtcaccccagtggccaagaagtcaaggaactgctgccctttgcatgtgaggtgtgcggcaagaggtttaagtatcgcggcaagttagccgtccacacgagatcacacacaggcgagagactctttcagtgtaatctctgcgggaagcgcttcatgcagcgcataggcctgcaatttcaccagcgaacccacactggcgagaggccctacacgtgtgacatctgccagaagcagttcacccagaagtcctacttgaagtgtcacaagagaagccacacaggggagaagcccttcgaatgtaaagactgcaagaaagttttcacctacaaggcaaatctgaaggagcaccagcgcatccactctggagagaaaccccacaaatgttccaagtgtccaagagccttcggtcggccggcgaccttaagacgccaccagaaaacacatcgagaagccacttcacagtgacttcaccatcgggtctgtcttctgcaccaagaaagtgtgaatgaagatttttcaccgatgttgtcagatgacgtttgacagatgaagggcgcctggcacgcagaggagtgccctagataggaattcctaggatgtttgtttaaatctttttcctccccgggggaattttggtttttgtttcattatttctattgttttaggtttattttggtttgtgttgctgttctttcaataaacatcttattagttttcaatattttgtaacaaaaaacagtctcctgattgacatgctgttgttatgcactgttttgctataaagtacaattgtccaaggagggtgtccggattaaatacacgatatgcctcgggaaatctgggtttcagataaacgttttttgtttttttagtatcagcttgttctaaattattcattatttatctgaaactcagcttttattaggtatcctaaatagttttcttttttatttttttttctattcttttttttgagatggggtctccctctgtcaaccaggctggattgcagtagcaggatcatcgcccactgcagcctcgaccttccaggctcaggcagtccttccgtctaagcctcccaagtagctgggactacaggatcataccaccacttcggccaatttttgtgtttttttgtggagatgaagatttgccttgttgcccaggctggtcttgaactcagaagtacaagtggtccaactgcctcagcctccttaagtgctggcattacaggcatgagccgctgtgccctgtattgtttttattagactttattataattatgatattcaaatttttggaaataattttttgtagtgatgggattttttgttgcccaggctggtgtggggtgagccaccacgcctggctaacgactttctttttcagagctgtcttaggttcacagggaaattcagtggacagcgcagagtccccgtagactcccaccccacacagcacagcccctccccgcccagcatccccagcagagcggtgcacctgttccatcagtgagcctgcctggacatatcaccaccacccagagtccatggtgttcattagggctcgctctgggtgttgtacatcctgtgggtttggacaaaggcctcatgagtacccaccactggagtattgtggggggggtattttcactgccccccccgaatcctctctgctctgcctatttatctccccgccccagatggtgtattttgtggcctaaatttggcaacctctaaattcctgatttgactcttgaactacggaggcattgggagtctctggtgactagttggtcttagtgatagtaccatcccctgaagcctttgttgatccagagatgggtggaccccaaactcagagcttctgatttagtaggccgggggtggggcctgagagtgtgcattaaaacagaattcgtaggccgggtgcggtggctctcgcctgtaatcccagcactttgggaggctgaggtgggcagatcacttgaagtcaggagttcaaaaccagcctggccaacatggcaaaaccccatctctactaaaatacaaaaattagccaggcgcagtggcacgtgcctgtagtcccagctacttgggaggctgaggcaggagaattgcttcagcccgggaggcagaagttgcagtgagccaagtttgtgccactgcactccagcctgggcaacagagccagactcagtctcaaaattaaaaaaaaaaaaagaatttgttttagaatagctttctaaagtccattgagctccctactgtccccacaccatttcctctattattttttgtttgtttgtttgtttgtttgttttgagatggagtctcactcagtcacccaggctggattgcagaggcacgatcttggctcactgcaacttccacctcctgtgttcaagcgattctcctacctcagcctcccatgtactgggactacaggcatgtgccaccacacccagctaatttttgtatttttttagtagagatgcggtttcaccacgttacccaagctggtctcgaattcctgacctcaagtcatccgcccatctgggcctcccaaagagctgggattacaggtgtgagccactgcgcctggcctcccctattgttaacatggtacgttagtatggcacatttgccacaagcgatgaactgactggatatattgccgtgatctaaggcccataccttattgaggcctccttagtgtttacacaatgacctcctcttccttcctccccatccaggatgccacattgccttgagttgtcacgtctccctaggatcctcttggtgacaatttcttagattttacttgtttgggatcacctgagaatgtgcattttaggtggtgctgatgctgctggtcttgggagaacattttatggatgagctgacaggcagagtcctgcagtctgcagaggtctggaaaggtcccttcccgaataggctggattcatttattaaaggccacttttgtaagactttggttcttgtcatcttaatttaaaggaaatttatcaagagacacacagcaaagagatgcatcatagagtaactattgcaaaggaaatagagtattttgaaagttaagggcagaatagacaggacatcctgggagcaaggattcagggccaactgctcctaaggatgagacagcaaagacccgctagagggagactcccctttatgggagtctcggatcattacacaagggggtgggaagaggtgttactagtaagcatgttctgggtggtcccctgggcacacaggtgcagtagctgtgcacacgtctctttagcatcttaagtctccacccaggggtgtgttttttactattataacgagcaaagggtcagtttgtgaacaggtaaaatcacaatgctcatgttctctacagggaaaactcccttttgtagatggttttgtgtgaatgaactcaattagaaagtgaaggctggggctgattgtgttggctgtacggtccccatgggtgctgcgtttggaggacatggtcaccttcttgactacctatcctgactcacccaggtccatttaggagaaagagtccttgaggtagaaacctgaatccgccatcaaatgtacacagactcccgtttaattcaagaagtggatgtttggtgggtagtggttctccatttagatattgggtccaacatccttctccagacacagaaaatgtgttgatgataccacctgcccacttaatttaaatcatgtttctctatgatccattaaccacatccgacatttctttagagcttcatttcccaattttcctacatgttggactcacttgaggtgttttttcaatatttttttaaaaagcaatgcctggggtccagccccaaggtaatgatgtgattggttgaggatgtggcccctgtgttgagagtttataaaactcctcaggtgatcaaatgtgtggctgagtctggcaggtcggttttctgattgtctggtcactccaattcctgttctctcatggggatcagtgagttcatttccacggagagtcatgcacctccattcccagtctaaagaaggtagactccacagctggctcccacccaccctgcacgggggtccctcccactgtggctggctacatgcaccactccagggactgcccctcatggctctgggcacatgtggcactgggtggcctttgcactgctgctccttatccacctatgtgctctgagccaagagcttgatttacctgatgtgacaatgaaaacaggatacccactgcaacctcaaaaaagcccagtgcggctgggcgcagtggctcatgcctgtaatcctagtattttgggaggccgaggtgggtggatcacctgaggtcaggagtttgagaccagactggccaacatggtgaaaccccatttctactaaaaataaaaattagctgagcatggtggtgcacgcctgtaatcccagcattgcattccagcctcggtgacagggcaagactcagtctcaaaaaaagcgccatgctagggatgactgaattgaatttagaaggtgcccttgctttcagaaaaacaacaacccaacactgcttaatctacccaacccggagccaaatctgcaccaaccaaccacctggcccacctggtggcttttcagactctgaccttgacgatgggacatgaggtggggaaggaggtggaagcacagctagggaagaaggggcaagagacccactcccctggcatgatccctggggtcttggaggctgggccggtcaacatggctgcagttatttctagctttctggattcccagaaaaaaacagctgtacttcaaagaaaatgcagaacaaggtgaggtcgacgtggaaaatcatcccaacatcagccaaacggaactgggctctgctatccgagtgcactcaggccaaacacccacgtgaagcttttacagtgagagaaaggaagacatttatttgcagggcaccaagcaaggagaatcgggcagctaatgtttaagacctgaactccccccatggcttaggagtaagggtttttttttttgtttttttgtttttttttgttttgtttttgagacggagtctcgctctgttgcccaggctggactgcagtggcacgatctccgctcactgcaagctccgccccccgggttcatgccattgtcctgcctcagcctcctgagtagctgggactacaggcgccatttttatgtataaatttataaagttaatattgataatgacagacagaaaataatgccttctctaagaatgtgtgaccaaccaccatccttccctcatggggatgtggagtttcccttgtcttggatgcctaacagagctgtcaatcaccacacatcctagaccgaccacatctttccccacctcacgtaagggtggctccagcccccttgatgtgcaatccacaagatttgtggggttatccttgattcctgcatttccctcacatgacacactcagtctctcaacaaatcctataccttaattaatgtgtttactgacatgaatttcacgcgacataaaattaactgttttatctgtacagtttagtggcatttggtgcatttacactgctgtgcggcagctcctctagctggttcctgtgcctgcatgtccagagtccaagttctgacatttgtacatactcatgaagtcattgccgtcatcaagaagctgaacatccccaccatcctccaacgcttccccaggctcttcatcatctgtccctcccacaactccatccctggacaaccactggtgttctctgtgtcattacagatcactgacagaatttccttatttttgccttttttttcttttttctttctttttctttttttttttttttgagacagtgtcttgctctgttgcccaggctggagtgcagtggcacaatcatagcgcactgtagcctcagcttctcaggcttaactgatcctcccacatcaccctcccaagtcgctgggaccacaggcacacatcaccatgctcggctaattgtttctatttttttgtagagctggggtctcactatgttgcccaggctgatcctgaactcctgggctcaagcgatctgcctgcctgggcctcccaaaaagtgctgggattacatgcatgagccagtgtgcccagcctaggggtagaattttctagcgatggaatcataccttatgtactccttttctatctgccctccttcaccttcataattattttgaaattcactcatgttcttgggtgtaatcaatgattcctttttactgctgagtagtattctcaacttcattgaattgtaccctttgcatatgtgtgatttattgtatatcaactatacctcagtaaaactatacgaaaaagataaggggttctctgttttttgttttgttttgtttttgagatggattctcactctgtcgccaggctggagtgcagcagcatgatctcggctcactgcaacctctgcctcccgggttcaagcaattctcctgcctc[135 bp omitted]ccgcccaaagcgctgggattacaggcgtgagccaccatgcctggccaggattttcttaaaacttaaaaacaaattcagcatttgaccagttctccccatttcaactttcagtattcatggtcaagccaacagccatcaacctggatgactctgttgccatcctcactgagctcctggttccttcccttcccctatatgggctgttatcttttttctcttttttcttattttgttctttttttttttttttttttgagacagggtcttgctctgtcacccaggcttgagtgcagtgacacaatcataatgccctgcagcctcaacctctcaggctcaaacaatcctcccacctcagcctccccagtacctgagactacaggtgtgcacaaccaggccttacaatttttttttttttgtatattttgtagagatggggtttcatcatgttgcccaggctggtctttaactcctgaacccaagctatccacctgcctcagcttctcacagtgctgagattacaggcatgagccaccgcggttggctgtatgggctattttcaaggcatcttctgagaaaacgctaaagagaagtcagaaagctactctatgaaggcagaggcattcgttggagctctgagtgatgtacctgcaatgtctagattctagttttaggagtcggcagagtcagcccaattctatgtgtcagaccaattcaatgactgaaatagtggcagctccacctactagtacaatgggtcaagttttcacatttcacttgttcctacaggatggggcctggcaggcttgagttgagatttatgcttgtttctatgtagctttggatcgttgtgaaagccaggtcatttcaatcattttgtgcaaacatcattgtgtgtaaaaacggtgtccacgttttgtctttgaaatggtccccgccctccgctcgttatcgtgttgagaatgaaatgagaggacatgcttggcacctggagatgattggatattacagctgtgcgccataagggcaaatggttccattgtttgatgagccgtcctggcggtgggtgggtcggtcacttctaaacagataaggaatggctagaaagctcttgtaccaaaccagcttgaagcaacctcacccacaccgaatccctccacgtttcttttcttttttctttcttcctttttttttttttttttttttttttttttgagatagagtctcgctctgtcgcccgggctggagggccgtggtgcgacctcgggtcactgcaagctccgccccccgggttcaagcaattctcctgcctcagcctccggagtagccgggattacaggcacccgccaccatgcccggctaatttgtgtattttagtagagacagggagggtttcactgtattgtccaggctggtcttgaactcctgagctcaggcaatgcgcccgcctcggcctcccaaagtgataggattacgggcgtgagccaccgtgcccagcaaatccgtctacttttcttttttctttctttctttcttttctttcttttctcccaacccccctccccccgtcaaacaaccaacagttttttaacacagaaagtaaggcataatccagggcttggactgtctttcaagaaaaccccaaacccgctgccaggaagtcacagccactaagtcccatcccaggcccagttgctgccaggaaacacaccgcgtggagacccagcatgactgctgactgattgcaagtccccaggagggctttatttttgcttttcaacatcctgttctgcaggttccttggctctttttgcccgtatgccgaagagccgggcattgggacgggccatgcggagactagcgaaggctttgaaattcttctcctcgatgatgactccagctttctccttctaggcattccggttgggcatgaccggtcctgtcagccgagcggccagtttcagttcttcagcagaactgtctcccttctcggaggccgagggcttcccggggaagcggatgcgtttggagcggggctccttcagccgccgcacgttggcctgcagggactgcgcctcctcggatccgcagaaatgccggcgtccgggcccccttcttcgcgtgccggccaccctgagctcctccaggcggaggccgcggccgtgcgcaccttcgtgtggtaccgaaccgtggggcagcgcacgatgggccggatgggccccgacgcggggcaggggcgaggcggcgcgccttggcttgcccggcctggcgcctgcggatcttctgggccggctggttgaaccgcttggccacgcgccgctgcagtccttggggaagcggggcttcgagatcgtgccgttccggctgggcgccgtggctgcctacggccctgcggctgcagaccagaggggagccaccgaggggaaggtccctgcgcgcgcgcaccccatccccggcctccgcctctaacctcccagcctgggccggaggccgcccctagagcccgggccccggtccaatgctgtctgcgaagaaggggcccatccatgcccgcgttggcggcagcgccaggccgatggcgctggatggagcccgaaggccgagaccccaaatccctctgcttttctaagaaatcgccctccagtctttttttttttttcagatctgtaacttgttttcacccctgatttaaaacaataccactgttctcccccaaattttcctttgatacagtaggtgaacaaaatagatttttttccccacaaatatcagcagacacttcttggcaccccacactgtattggcatgggtgttaacagtcccagttcaggtgtgcagcctttcaggtggatgcactgtaacaaggatgtaaatgcggagccatcctaagaatcacattcagtcatggggttgcccttccaagctggcagaaaaggaacccgggccaggcacc[184 bp omitted]gaggcaggagaatggcatgaacccgggaggcggagcttgcagtgagccgagatcgcgccactgcactccagcctgggcaacagagcaagactctgtctcaaaaaaaaagaaaaaaaaaaaaaagaaaatcgacctgccagactcagccacacgttagatcacctgcggagttttataaactctcaacacaggggccacatcctcagccaatcacatcattaccttagggctggaccccaggcattgcttttaaaaaaaatattaaaaactcctcaagtgactccaacatgtagccaaattagaaaatgaagctctaaagaaacattggatgtcattaatggatcatagagcaccatgattgaaattaaacgggcaggtggtattatcaacacattttctacgtctgtgaagaaggttggacccaatcaccaaaagggagaaccaccacccacccctacctccacttcttgaatgaaaggggagtctatgtacattttatggtggattccaggtccctgcctcaaagaatgctactccgaaacggacctgggtgaggcaggataggcagtcaaggaaatgaccacgtcctcaggatgctgcacgcgtggtgactgtacagtcaacacagtaagcctcagcgttcacattggaattgagttcattcaagcaaggccatctccagtagggtatttccactgtagtatttccactgtagagagaatgtgcacgttgatcttacccatccacaaaccgacacatttcttgttatgatagtaaaaaacacacacctgggcgggcagttaagacgctaatgagacatgtgcacagctactgcacctgtgtgcccagaagagcacccagaatatgcttagtagtaacacctcttcccacccccctaggtgtaatcatccaagactcccataaaggggagtctccctcaagcaggtctttgctgtctcatccttgggagcagctggccctgaatccttgctcccaggatgtcctgtctattctgcccttaactttcaagatattgtatttcctctgtaatcaattattctatgatgcatctctctgctgtgggtctcttgattaaattcctttaaattaagatgacaagaaccaaagtcttacaaaagtagtctttaataaatgaatccagcctatttgggaagggacctttccagacctctgcagattgcaggactctgcccgtcagctcaatcagccatccataaaatgtcctcccaagaccagcagcatgagcaccacctaaaatgtacattctcaggtaatcccaaacaagtaaaatctgagaaattgtcaccaagaggatcctagggagacgtgacaactcaaggcaatgtggtgtcttggatggggaggaaggaagaggagggcattgtgtaaacactaaggaggcctcaataaggtatgggccttagatcacggcaatatatccagtcagttcatcgctccagtcagttcaaaggtgccatcctaatgaaccatgttggcaatgggggaagccatgtggggcattagggagctccatggactttagaaagctattctaaaatgaattatatattttaatgcacactctcaggccccatgcccggtctgctcaatcagaagctgagtctggggcccacccacctgaggattaaccacgccttcaggggatggtagtatcactaagaccaactagtcaccagagactcccaatgcctctgtagttcaagagtcaaatcgggaatttagaggttgccaaatttaggccacaaaatacaccatctggggcagggagataaatatgcagagcagagaggattccgggggcagtgaaaataccccccaggatactccagtggtgtgtactcatgaggcctttgtccaaacccacagcacgtacaacacccagagcgagccctaatgaacactatggactctgggtggtggtgatatgtccaggcagcctcactgatggaacaggtgcaccactctgctggggatgctgggcagggagaggctgtgttgtgtgaggagggagtctaggggaactctgtgctgtccactgaatttccctgtgaacctaaacagctctgaaaaagaaagtctagagccaggcgtggtggctcaccccacaccagcctgggcaacaagaaatcccatcactacaaaaaattatttcaaaaatttgaatatcataattataataaagtctaataaaaacaatacagggcacagcggctcatgcctgtaatgccagcacttaaggaggccgaggcagttggatcacttgtacttcggagttcaagaccagcctgggcaacatatcaaaattccatctctacaaaaaccacaaaaattagccaagttggtggcgtgctcctgtagtctcggctgctcgggaggcttagatgggaggattgcttgagcctggaaggtcgcggctgcagtgagcggtgattatgccactgaacctcagcctgcgtgacagagggagacgccatctcaaaaaaaaaaaaaaagaaagaaagaaaaaagaaaacgaaaactctacaggatacccaataaaagctgagtttcagataaataaataatttagaacatgctgatactaaagaaaattgtttatctgaaactcaaatttcatcaggcattatgtattttatatggccaccctccttggacaactgtactttacagcaaaacagtgggtaaccccatgtcaatcaggaaactcagttttccgttatacaatattgaaaactaataagatgatcgtttattggaagaacagcaacacaaaccaaaataaacctataagaaaacaatggacataatgaaacagaaaacaaagctcagtggggaggacacatatttactcaaacatcctggcaattcatatctagggcactccctctgtgtgtcagacgcccttgcatgtgtcaaatgtcatctgataacattgatgaaaaatatcattcacttcttcttggtgcagaaggcatagaccggattatgcaatcactgagaagtagcttctggatgtgttttctggtggcgtcttaacaatttcagccgactgaaggctcttggacacttggaacatttgtagggtttctctccggagtggatgcgctggtgctccttcaggctccccctgtaggtgaaaactttcttgcagtctttacattcgaagggcttctcccctgtgtggcttctcttgtgacacttcaagtaggacttctgggtgaactgcttctggcagacgtcacacgtgtagggcctctcgccagtgtgggttcgctggtgaaattggaggctaataagctgcatgaagcgcttcccacagagattacattgaaagagtctctcgcctgtgtgtgatctcttgtggatgactagcttggaattacacgtaaacctcttctcgcacacgtcacatgcaaagggcggcagtgccttggcttcttggccatccgggtgactgactgggctcgcagggcctggggaatgaattgaattcatcccagcttgtcccggggattctctgttgcccacaggtgtggcttctccttgaggctcttcttgggaaatggaggaggcatctggtttgcttcttttgggactgctcagattcagagcgtctcctctgttcccgctgtgagtcgaagcttctctctccacaacgcaggcagaaggtgtgtcagcatccacattttccacagaggctatttttggggggtccttcccctcctttgctctcaccagatctgctggaagaagggattccacacacacagttaataaagcgcattttcaatacaccaaactcattgcaaccaaacactgatgttggctgacaacttccgctcaagctcaagcctaagacattggactgtaggtctctggaaagtagaggatggggaggctttgacagctgagtgccaactcccccaggggatgataatgctgggcccccagccccgcaccccagaagagagggactaacccctgtggatccaagtcttcatactcactgggactctttggaagctgaggctctggggatgtcagtcctgggttctcttccctgttttccttcagatccttctccaaggtctgcttgggtctcagagactttgggtcacctgttacgtcaatactcttgtgtagcagaaagtcctctccctgaagaggaaaaaccaagagtaatgactgctgtgtccaaactggtggaagcagggacacatctgtccccttctgattggatgcaacaactcttctaatgacacaggtgtggaaatacgtgcagacttcccctggaccaccccatcaccccacgtaaacatcaccatctcatttctgtgtctgtccctaatctgcaccctccatattccaaatcagctcctgtgcctggtggttttcactgtttggttctctgagcatatttctccccgccgtgccaacgtctccctgcacctgacactggaaggagcatgactctagtcgaggcccctcagctgtggcaccactggcattggggctgcatcaccctgctggagggggcgctcctgtgcagagcagagaccccacctccaccctctagatgctattaacaccccaccatcccctacaatgacacacaaaagcatctccagacatggccatgtgtccggaaaggcagaatcaccccagttgagaaacactcctcaaattaagaaattgacaatctgtagaaaatggtttccttgctgaattattacattaaatgtctttgaggaaactggctacggggaaggaatcttcattcatctgtgcaaactgcctccctcatttcactgagatcatttcttatgccccaccctaaatgctaaaagctctcatggtggagagaaaagtagatgaggcttccctctctgtgatggctcaggaatgaatgtttggggatgtatcatgtccatggggaatggctctaatcttgtcctgtgtcaaatctctcaatcagtccagcggccacacgatttcctcctgttccttctcccacctctgcccagacaccaaggcctcacacactcacctgcctcctggacaatgcagggaccctgggcaggatctgcagctctcggtgggcctggccttcccctggacgcatctggttcaccgaggaggcccgttggctggacacgtctttcagatcatctctgacactggagggggcttcagccatctcgatatctgagtcctgcacaatatattcctttccgtggaaggtgaccacagactgtagagagaaaaaagacaatcagactcaccatgagaacctgaaagtagctctcatattccctgggtcctgccataatgctcacactttactgtaattaatgttcaaatctgccttcccaatagagagtcagctctgtggacacagcaatcctgtctgaattttttcctctctagactccagcacctgcctgcgcctggaatattctagttaagtacataaacatgggtcctttagatgaaatagtctctaaaccaaagagaagacaaggagaaatattctgggtgaatccaactcaattggccgatggcagctcaccttgtattagaacttaggggctcatttggggacctgggggcagatccctgcatctgataccaaccactttccctgcttcaggatgggactcctgggccccccttcagttcactctaatgcctccttccctacattccatcaggcctaatatttcaccaatgtctttctttcatgttggcctcacacagtgtgtgggtccctgtaccccctctgcctgtccatctcctacaccaggaacttgccgtctcagcacagctgatattggaatctggatgattatttgtcatgatgggttgtcctgagcgttagagaacgcttagcagcgtctcctgtcctccctgacaacaaaaactgtccccagacactgccatgtgtccccgacgggcaaactctcctctacttggaagccctgacctagagcagcccctcgggtcctctcgagtccagctgcaccgtgcagcccccatcccagctccccttccctgcaccaatcacgagggtcccactcacccatttcttgggtcttctgttatttcgtagcaggtcctccaggtctttgcagctctgcacaccgttcatcatgactaagacctggagctcctggggcatggagatcatgaactgctccatcaccagcatgtccaggatctgctctttggtgtggaggtcgggcctcagccacagatggcacagctcagtgagtttcctcagagcctggatggggtccgactccttcgggcagctgaacatcctgaagttcacgtgagaaatctcagggtccacgtcgtgatttccaagttgagtttctgaggatgccatagaccgtggcagctccaacccaggtctgttgcaggattctcctagactccatgaggatgtgcaatttgcagccatatctagtggagaattttttaatcagtctctgagaaagctcttccagtagctggtatctaattgatacctatctacacaggcttcctctggttttcctcagtaatagattcactgttcattcagaagtctgggggggaaaagtatgagcctcattagtttaagttactactccatccatccctcccttcgaaatccctcatcctggatgccacttcttcagcagcatcgaattcagcacagtggaaatcttccagtgtctatacctgactacatactctggtttaaaatcttaatgacccctggattctgatctctaggaaatcactgtgcagaggctgaatcagttttcctgtcaattggaacaacattgttcttgactataaattaaataagatagttaggtgaagctctgaaaatgtgatgcaacaataaagtaagccctttatgtttccccatcaggacaagatccaaggcaaagcccttagtcataattatgcaaaaggatagagaaaaagagttagaatgtaatattttccccaacacatattcttgttaactccagaacatttacttgctccagggaagggacagcattaaaggatcctatgaggattaagcacctacacagatattttgttattttggtaaaatgtacattcataaatttcatcattttttactctcttcaagttcacgattttatgggactaagacatgcaccatgttgtacaaccattaccactgtttacttccagaattatctcatcaacccaaaagcaaccccatccccatcagtgatcaccccctgcccacccaccccagcccctagcaatcactaatctaccttctgtctctaagggtttctgtattcctaatctcatctcagaaaatggatttaaagtctagtgctctttgatattttaaagaagtgggttgatacaataataagatttttaaaaattaattcctaaacctagcttcattaggcaggagccactgagtgatactctccaggcatcaattatcgtccaagttcaacagctatgagaacacagccctgctttcctagacacaggtgggggaagcaacctgaaggtctgcagaggggagaaaaaactggcagaagggtcttgggaaaagtcactggtagcctggagggcgagtgccccacacttcctggaaggactttgagcaagtgcagaacagagagacagccagggagacaatcggcagaggcgggagacaacccagaggaggagacaatatttacacaccacacatctcacggggctcctgtgcaaaacataagcaactcaaactcctccagagcgagaaaacacataacccactagaagggcttaaggcgcctgtgtggacatctcagatgaagacatgtgaatggccagcaggtctaggaaaaggtgctcattatcactcatcatcagggacatgcaaatccaaaccacaaggcacccctcacgcctgctagagtggctgttcccaaaaagacacatggaacgagtgttggtgaggatttgggggaaaggggtcctctgcgccctgtgctgggatgtaaattagagcagccgatatgggagacagtatagaagctcctcagaaaattgaaagtccaacaactgcatgatccggcaatcccgctccggggcaggtacacagaggaaaggaaatcaggacgtggactccaaaacagtgaaactctggagggatagagggagggagggttgaaaaactacctattgggtactatcctcatatcctgggtgatgggtagagtcatacctcacacctcagcatcactcaatatactcatgcaacaaatctgcacaggtacccactgaatctaaaacacaagttcaaattacaaaaaaaaatttaaaaagaagtaaataacataaataataattaaaaacccagtggaactcatagtagtagtgagtagaatagttaccagggctggggtaggggttgggaagatataggtcaaagagtacaaatttcaattgaagaaatcaattcaaaagagcaattgtccaacatggtgacttcagttcataacaatgtattgtatacttggaaactgcttaaaaaaaattagatttcaagtattctcaaaaccaaaaatggttagtacatgaggtagggcatatgaatattagctcaatttagccatttaacaatgtttgtaatactacaaagcatattatgctatatgccataaatatatacaatttttagttttcaattagaagcaaattaatttttattgaaaaagcacacagatatgatagagaaaagggagcctgaaattctggaattaaaagtggttttgccagagggcgcctgctgctgctcaggaggcagaggcggaggtgggaggatcacttgagcccaagtgtttgataacagcctgggcaacatagtgagatcctgtctctaaaaaagaaagtggtttcatgttcctagaaatcactttgtatttgatcttagttcattccccgttaaagtaagaaacaagacacaggaaaaaataaaggcagacacaggagttagtattcaattctgggagtatataccacacgggtcacccaggtagggacacttagctcagattctcattggcctagtaggttgatgctcattcatcaatgatttgatttcaccctgtgcaaagggaaaatccagcaatgctttttaaaaagggtgtgtggcaggcaaagtggctcaggcctgtaattctaacaggttggaagaccgacatgggaacatgctagagcccaggagttcaggaccagcctgagcaatataccgagaccccatctctgcaaaaaaaaaattaaaaatttatccagtcgttgtggcatatgcctgtagtcccagctactcgggaggcggaggcgggcggatcgcttgagcccaggaattccaggctagtctggaattcaagcgagaccctgtctctaaaataaaataaaatataacctaagcttgatgagaaagttagtattattcctagtttacagaagcgttacataacgagtcagagttaatcatggggtgcaaaggagacccgctgccttcacaaagtctccgagaaaacgcacgaaaaaataaacccaaactttctgaaaccaacccccgacatgccagctcctaaacccgacagacatccccgctggacactcacctccttcccggcttctgcctccgaccttctcggtctgggatgcgctctccaaccggcctggagctgaactgcgtctatttatggagaagcgggactccaggccgcgtttccggttccctgcgccgccccgtgattggtttagggccatagagtccattttacgtaatcggcgttgattatggttcccactgaaaccccacccacaggaaattaatgtactaaacatgcctactgtgcaaatatttcccgctctactgagttgtcatactgctgaagtatttggtggcctcagaaaatatagatttgcgagttttaaccattttgggtcccctcatgccacagacagtaatatcctaacaagtaaagaacatgttaagagctggtggattagtatcaaaccagtgatttgatctagtttgagcaaagctctcacatatgaatgtcaagatactgaaaaaaagagacagtctttgttgatacataatgaatattggtgataattttttactgaaaaaaagagacagtctttgttgatacataatgaatattggtgataattttttattttttaaaaagaatattggagttgacatgggaaagctttgtttgaactagactaaatcagtggtttgatatcagccaacctacccttatataaaaacagtgggaaccagagaaaggcacatggtccccactctgcattcattccaggacggtgatagggtggtttatagatacactgagggtcctacggggttccctagttctcagcccccctcagttagggctctcaagcacgaaaagccttaacggtgggtgtgaattttactgtgtggatcatggagttaatgtggaatgataattaagtgctaggcaggattagattacaatttgggaagttcacaccatcagttggatgacactaatccattcaagtagtgactcattcattttaatttcagaggaaaccttctcgtctaacctttaggacaaattggagggctgttaattttacactgattctggtttaaatccttggaaaatcttaagccgcttcactctgggaacttcaaacttcttgggagtagaactttcctgatgtgttgttttgaagatgaagtaagactatgtcagtaaagtgctcaatacaaggttcattttgccaagaaattgtaacaattattttctgaggcatgttctcatactttgttacattttttcttgtttaccactgaggtgttgactctaactcaactctaacaaatgagttagagttaagaatggaattattcactggaattaactgggagctgcctaagccactctctggctacccaattcccgattcccctaaatcctcccctctgtaaactcatagtcttatttctgtgaagctgccgttggtattttggaagagaccgcatcgaatctgctgatgtctattaatagtatggtctttttcacattctatgaacatggctttccatttttggtggtcttttttgttttttttcattagcacttaatagtttttcttgtggaaatctttcacctccctggttaaatttattaccaggtttttaggggttcttttgctattgtaaatgggattgctttcttggtttttgttccactagcttgttggtgtataaaaacactactgatttttgcatgttgacttcgtatcctgtagttttactgaattcctttatcagttctgttttactggtggaggtttcaggtgtttttatagatgataacatgttgtttgcaaagagagacaattcgacttcctccttctgaatttggatgccctttattccttgctctggctaagactttcccaacacattattattatattattattattattttgagacaaagtgtcgctctgtcacccaggctcactgcaacctctgcctcttgggttcgagcaattatttgcctcagcctcccaagtagctgggatttcaggcacacgccaccatgcccggtgaatttttc[142 bp omitted]acaaaggtcaccagggtgaagtttggaaacaggtatacgttgtgatgcaatcgtcagaaccaagctagttaacatctccatcacctcacatagataccatgttctttccttcttattagttatttaactcttgggctcaagcaatcctgcttcagcctccctagcagctggggttacaggcacgagccacatctggctttctttttatttcttgatgtgtgtgtgtgtgtgtgtgtgtgtgtgtgtgtgtgtgtgttggaaacatttaagatacaccctctgagcaaatttcaagtatacagtacagatgctcctcgacttacaatgaagttacatcctgataaaccctattgtgaatgtaaaatatagaaaataaaaatgcatttactattaggtcacttactgaacatcagcacttagcctagcctaccttcgacgtgctcagaacatttacattcccctgcagtcaggcaaaatcattcacaggaaacctattttataatagagcactgaatatctcatgtcgtttattgaacattgtactgaaagtgacaatcagaatggtgtgtgaatattcctcagtaacgtacacagctgaaagcagaactttgagatcagactggcaacatggcaaaacccagtctctacaaaaaaacacgaaagttcactgggcattatggtgcaagcctgtagtcccagctacctgggagtctgaggcagaagaattgcttgagcctgggaggtcaaggttgcagtgagctgtgatcacgccactgcactccagccagggtaacagagccagaccctttctcaaaaaataaatgaatacataaatgttcccctcatacaaaaaagataagtatgcaagtcactcatatgtcaaattattagatttagcattgcacgttgtatatatgtatcaaaacattatgttgtacaccaaaaatgtgtatgtaccatttttatttgtaaatttataaagttaataataataatgacaaaaagaaaataatgccttctctaagaatgcgtgaccaaccaccatccttccctcatgggaatgtggagtttcccttgtcttggatgcctaacagacctgtcaatcaccacacatcccagacctaccacatctttccccacctcacgtaaaggtggctccagcccccttgatgtgcaatccacaagatttgtggggttatccttgattcctgcatttccctcacatgacacactcagtctctcaacaaatcctataccttaattaatgtgtttattgacatgaatttcacgtgacataaaattaactgttttatctgtacagtttagcagcatttggtgcatttacactgctgtgcagcagctcctctagctggttcctgtgcctgcatgtccagagtccaagttctgacatttgtacatactcatgaagtcattgccgtcatcaagaagctgaacatccccaccatcctccaacgcttccccaggctcttcatcatctgtccctcccacagctccatccctggacaaccactggtgttctctgtgtcattacagatcacggacagaattttcttttttctttctttttttcttttctttttttttgagacagtgtcttgctctgttgcccaggctgcagtgcagtggtatgatcacggctcactgcagcctcaacttctcagccttaagtgaacctcctacctcagcccccccaggtggctgggaccactatgtccggctaattttttctactttttgtagagatgggtctcactacattgcctaggctgatcttgaactcctgggctcaagcaatccacctgcttttgcctcccaaagtgctgagattacatgtgtcagccactgtgcccagcctagtaatagaattttctagaattttatattgatagactcataccagatgcactttttttctggctgtcccctttcaccttcgtaactattttgagattcatccatgttcttgggtgttatcaatgatttctttttactgctgagtagtattccaaactttattaaattgggccctttggatatgagttatttattttatatcaactgtacctcaataagaccatgaaaaaaaaagaggattctcttaaaacttgaaaacaagttcagaatctgaccagctctcctcatctcaactaccagtactcatgggcaagccacagccatcaacctggctgactctgctgtgatccacactgagctcttttttcttccccttcccctatataggctaatttttttttctttttctttttctttttttcagacagggtcttgctctgttgcccaggctgaagcacagttgcacaatcatagctcactgcagcctccacctctcaggctcaagcaatcctctcacctcagcttccccagtagctgcgaccacaggtgtgcaccaccaggcctggctaattgttttgtatgtttttgtagacaccgagtttcaccatgttgcccaggctggtctttaactcctggacccaagcaatccaccagcctcagcttcttaaagtgctaggattacaggcatcagccatcatgtctgactatatgggcttatttccaagactttattccaaaaaaaatgttaaacagaagtcagaaagctactctatgaaggcagaggcattcgttggagctgtgagtgatgtacctgcaatgtctagattctaattttaggagttggcagtgtcaacccaattctgtctcaacactattcaatgactcaaataatggcagctccacctactagtacaatgggtcaagtttttacatttcacatgtgcctacaggatggggcctggcaggcttgagatgagacttctgcttgtttctatttagcttcagactgttgagaaagtcaggtcatggcattcatttagtccaaacatcattgtctataaaaacggtgtccacgttttgtctttgaaatggtccccgccctccgctcgttatcgtgttgagaatgaaatgagaggacatgcttggcacctggagatgattggatattacagctgtgcgccataagggcaaatggttccattgtttgatgagccatcctggcggtgggtggatcattcacttctaaacagataaggaatggctagaaagttcttgtaccaaaccaacttgaagcaacctcacccacaccgaatcctatacttttctatgaaatcacctttttttttttttttggagatctccaactttttttcacagctgcttaaaaaaaaatactactgttcaccccagactttcttttgatacactaagtaaacaaaacagattttttttttttgccataaatatcagcagacacttcctggcaccccacactgtatcagcatgtgtgttaacagtcccagttcagatgtgcagtgtttcaagtggatgcactgtaacaaggatgcaaatgcggagccaccctcagaataacattcagtcatggggttgcccttccaagctggcagaaaaggaacccgggccaggcaccgtgagcacgcacagtaactcacgcctgtaatcccagcactctggaaggctgaggcaggaggatttcttgagaccaggaatttgagaccagcctgggcaacatagtgagacccaactctacaaataagagattgtgtgtccggaggctgaactcacaaagatttcagaatgtcagtaggagaggaggtgtgtgggatagcagccaattcgtcagtgaatgaggcagagaaattggtaaaaagaaggaaagtgaaaacaagaagcatgttcccattttcaaggtcttcctggttcacaaagtgggaaggaagaaactactgaagaggaaagagttctcttgaagagtacagaattcctgggctccccggttcaggtcataaaaagaaaagagaaaacgtttgcagccatgcagggtgaacaagctctgaagatatattatacggactaggggttgtaatcaatgttagggaccatcccctacttctgagggctctgaggcaggagaatagggtgagggaagagagagaccctctcatattgttttatattgttttatactcaatacctgttttaaaaaaaaaacaacaaggaagtaaaaccaaagacaggcagcccggcgccaggcccgaaaccaggcctgggcctgcctggcctaaacccagtagttaaaaatcaactgataacttaaaaaccgatgttattcatagattccagacattgtatagaacaacattgtgaaactccctgccctgttctgtttctctctgaccaccggtgcatgcagcccctgtcacgtaccccttgcttgctcaaatcaatcacgaccctttcatgtgaaatccttagagttgtgagcccttaaaagggacaggaattgctcactcgtggagctcggatttcaaggcagtagcttgccaatgctcccagctgaataaagcccttccttctacaactcggtgtctgagaggtttcgtctgtggctcgtcctactacaagggaattagggtaaccaggggttaaggtagaagcaaaagaaccgcacttgcagccagttctaggcaagattaggcagcacacaggccacatcctcactcctgtgataacgagacagaagcctccactccagcctctgattgaccgtgggccaagcctccactccaacctctgatggacggtgggccaagcctccactccaacctctgatggacggtgggccaagcctccactccagcctctgattgaccgtgggccaagtctccactccagcctctgatggacggtgggccaagtctccactccagcctctgatggaccgtgggccaagtctccactccagcctctgatggatggtgggccaagcctccactccagcctctgatggaccgtgggccaagtctccactccagcctctgatggacggtgggccaagtctccactccagcctctgatggaccgtgggccaagtctccactccagcctctgatggatggtgggccaagcctccactccagcctctgatggacggtgggccaagcctccactccagcctctgatggacggtgggccaagtctccactccagcctctgatggacggtgggccaagcctccactccagcctctgattgaccgtgggccaagtctccactccagcctctgatggacggtgggccaagcctccactccagcctctgattgaccgtgggccaagtctccactccagcctctgatggacggtgggccaagtctccactccagcctctgatggaccgtgggccaagtctccactccagcctctgatggatggtgggccaagcctccactccagtctctgatggacggtgggccaagtctccactccagcctctgatggacagtgggccaagtctccactccagcctctgatggacggtgggccaagcctccactccagcctctgatggacggtgggccaagcctccattccagcctctgatggacggtgggccaagtctccactccagcctctgatggatggtgggccaagcctccactccagcctctgatggacggtgggccaagcctccactccagcctctgattgaccgtgggccaagcctccactccaacctctgatggacggtgggccaagcctccactccagcctctgatggacggtgggccaagtctccactccagcctctgatggacggtgggccaagcctccactccagcctctgatggacggtgggccaagtctccactccagcctctgatggacggtgggccaagcctccactccagcctctgatggacggtgggccaagcctccattccagcctctgatggacggtgggccaagtctccactccagcctctgattgaccgtgggccaagcctccactccagcctctgatggacggtgggccaagtctccactccagcctctgatggacggtgggccaagcctccactccagcctctgatggacggtgggccaagcctccattccagcctctgattgaccgtgggccaagcctccactccaacctctgatggacggtgggccaagcctccattccagcctctgatggacggtgggccaagtctccactccagcctctgatggatggtgggccaagcctccactccagcctctgatggacggtgggccaagtctccactccagcctctgatggacggtgggccaagcctccactccagcctctgatggacggtgggccaagcctccattccagcctctgatggacggtgggccaagcctccattccagcctctgatggacggtgggccacgcctccactccaacctctgattgaccgtgggccaagcctccactccagcctctgatggacggtgggccaagcctccattccagcctctgatggacggtgggccaagcctccactccaacctctgattgaccgtgggccaagcctccactccagcctctgatggacggtgggccaagtctccactccagcctctgatggatggtgggccaagcctccactccagcctctgacggacggtgggccaagtctccacgtcagcctctgactggtcgcaggtcagtccttcacggggtgtagccaatgggaggcctgtcaaagacaccgaggggtattgccgggttccttttaataaaaaccctaattgaggaagctcttgggcctcttgctggagccccgctcccagtctgtgaattgtcttcaataaacctgtgctttccttactccgtttttttgtgtttttgtctttcgttgctttgttcttttgttactttgtgcgtttcattcaattctctgttcaacacgcctagaacgtggacaactccatccggtaacagctccacgtacaatttttctcctttgcggcggtgctttcagctgtgcacattgctgaggaggatccacaccgccattctgattgtcactttcagttcagtattcaataaactacaggagagagtcaacactttattataaaataggttttctgttggacgattttgcccaactgtaggggaaggtacgtgttcagggcgggtttagggtaggctaggctaaactctgatgttttgtaggtgacataatattaaatgcattttttatcttctatattttcaatttatcaggatgtgacttcgctgtacgttgaagagcatccacactgtatcgcatacttgaaatttgctgagaagatcgattatgggccggggcgcggtggctcatgcctgtaattccattaatttgggaagctgagacgggcggatcgcttgagctcaggagtttgagaccagcctgggcaacatggcgaaaccccgtctctacaaataatataaaaattagccgggcatgggtggcgcctgtattcccagctgcttgggaggaagaggcagtaggatcatttgagcccgggaggtggaggttgcagtgacctgagattgtgccactgtgctccagcctgggtggcagagtgaggttctgtctcaaaaataaaaaaaatttaaaaaatgatagatcataagtgtttcaccacagacacacggacacacacacatacacacatacgcacacatacacacacacgtcaaagaaacaaaaagcaagccaggagtcgtggcatatgtgtctagtcccctagacacacacagagacacacccggacacacggaaacacatacgaacacacacccacacacagacacacacatggacatacacacatacgcacacatacacacacacacgtcaaagaaacaaaaagcaagccaggggttgtggcatatgctcttagtccccactactggggaggctgaggcaggaggattacttgaggccaggaattaagcaaataaataatgaaatgaaaatagtcactatgtgagttgacgaatacattaattagcttgattgtagtataattacaccatgaatagggatatgtaaacaccagcatggtgaccttagtcaccaaggacaggtagaggccaggaattggagagcagcctgggcaacacagtgatacccccatctttacaaaaaaatcttttaaaattagccaagtgtggtggtgcttgcctgtaattccagatactcactcaggaggctggagcaggaggctctcttgagcccaggggttcaaggctgcagtgagctatgagttttccattgcacccagccaaggtgagtgagaccttggctctaaaaataaatcaatcaataaacaaatttatccacacaggtaggagatctctacaagaaaaactataaaatactgatgagaggaaatgaagagggcacacaaatggaaagatagtccatgttcataaatcggaagaattcacattgtgaaaatgaccacactattaatagagatctatagatccaactcaatccctaccaaaatgccaaggacattccttatgagaacatgacatgtttcaagaggagaggactggagggaattgggtaggtagatggtggttttaggcagattctagttcattccacttaataactccattctgaactgactcactatcaacgcctcaattcttaacaaggaaaaatatcacaaagtatgagaaaatgcatcaggaaataagtgtcagaactttttggcaaaatgaccttgtgtcgggcactttactgacataatcttatatcatcttccaaagaacatatcaggaaggtaataattccctggttctattcacagggagcttgaagttcacaaaattcagtggcttaagatttcccaaggatttaaaccagaatcagtgtaatattaataacccttcaatgtatgttaagtgttagatgagaaaatttactctgaattaaaaatgaatgagccacaatttgaatggatttgtgaatcagtcagcggatgctgcgaacttcccaaattgtaacctaatcatgtaatctaatcatgacactcagttttcattccacaatgactccatgatccacgcagtataattcacacctaacattaaggcttttcacgtttgagaggcctcagtcagggggctgagaaccagggaaccctgtaggaccctcagtgtatctataaaccaccctctcaccgtcctggagtgagtgcagagtggggaccatgtgcctttctctggttcccactgtttttacataagggtaggttggctgatatcaaaccagtgatttagactagttcaagcaaagcttttccatgtgaattccaagagtttgaaaaagaaaagtaaagaattatcactaatatttattgtatatcagcaatgactgtatttttcaatatactgacattaatatgtgaaaggctttgcttaaactgcattaaatcactggtttgatattaatccaacaactcttaacatgtcctttatttgttaggatattactgtctgtgtggcgcgaggggacccaaagtgattaaaacttgtggacctagggccaggtgtggtggctcacgcctgtaatctcagcactttgggaggc[134 bp omitted]gaggcaggagaatcgcttgaacccaggaggtggagcttgcagtgagccgagatcacgccactgaactctagcctgggggacagtgtgagactctgtctcaaaaaaaaccaaaagaagaaaaaaaaacccataaaaccaaacaaaaaaaaacttgtggatctatattttctgaggcctccaaatacttcagcaatatgacaaataattcagtagagtgggaaaacctatgttatttgcacagtaggcatgtttaatactttaacttcctgtgggcagggtttcattgggaaatgtaatcaactcggatcacctaaaatggattacgtggccctaaaccaatcatggggcagtgcaggaactggaaatggggcctggagtccttcgacttctccataaataggcgcagttcagctccaggccagttggagagtgcatcccagatgcgagaaagttggaggcataaggcgggaaggaggtaagtgtccagaggccatgtctgtggggtttaggagctggcatgcaggggggttagtttcagaaagatttgggtttattttctcatgcatttgcttggagaccttgtgaaagcatcgggtctcctttgcaccccgtgattaactctggcttgttatgaaacccttatgtaaactaggaataatattaactttctcatcatgggtaggttacattttagagacgggggtctcactcattgcccaggctggcttgaattcctggtctccagtcattggcgagacttcacttcaccatcagctgggacgacaggcacctacctgccaacaggcccggctacattttatttttttgtagagatggggtctcggtatgttgcacaggctggtcttgaactcctaggctcaagcaatcataccacctgggtcttccaaactgttggaattacaggcgtgagccaccttgccggccgcactccacttgttaaaaagcatcactggattttccctttccacagggtaaaatcagccattaatgaatgagcatcaacctactaggccaatgagaatgtgcactaagtgtccctacctgggggtcctgtgtgctatatactcccagaattgaatactaacccgcatacctgcctttattttttcccatgttccattgcttgctttaatgggaaaagaactgagagtgaatacacggtgatttctaggaacatgaaaccacttttttaagagacaggatctcactatgttgcccaggctgttatcaaactcctgggctcaagtgatcctcttgccttggcctgagcagcagcaggcgcccttgcagcaaagccacttttaattccagaattttaggctctcttttctctctcatatttgtatgcttttttcaaaaaaaattaatttgctttcaaattgaaaactaaaaattgtatacaattgggcacagcataatgtgctttgtaggatgtgaacgctgtaaaatggctaaattaagctgctattcacatgccttactttatgtactaatcatttttggctgtgagaatacttgattgaaatctactcttttagcaatttccaagcatacattgttatgaactgaagtcaccatgttggacaacggctctcttgaattcatctctccaactgaaatttgtacccttagacctatatctccccaacccccatcccagccctggtaaccaccattctactcactgctactatgagtccactaggcttttaaaattattattcatgtcatctacttcttttttaattttttaaatgattttaacttgtattttagattcgctgggtgcctgtgcagatttgttacatgagtgtattgagtgatgctgagatttggggtatgactcaacccgtcacccaggatgtgaggagcacccgataggtagtttttcaaccctccctccctctatccctccagagtttcactgttttggagtccacgtcctgatttcctttcctctgtgtacctgccccggagcgggattgccggatcatgcagttgttggactttcaattttctgaggagcttctatactgtctcccatatcggctgctctaatttacatcccagcacggggcgcagaggacccctttcccccgaatcctcaccaacactcgttccatgtgtctttttgggaacagccactctagcaggcgtgaggggtgccttgtggtttggatttgcatgtccctgatgatgagtgatgacgagcaccttttcctagacctgctggccattcacatgtcttcatctgaggtgtccacagaggcaccttgcccacttctagcgggttatgtgttttcttgctctggagtagtttgagttgcttatgttttgcacaggaactgcttgtgagatgtgtggtgtgtaaatattgtctcctctgggttgtcttccccctctgctgattgtctccctggctgtctctgtgttctgtacttgctcagattccttccaggaagcgtaggttttccatccttcaggattccagtgacctttcccgagaccctcctgtcaattctttcttccttctgaagacctttcggttgcttcccccacctgtggctaggaagacagggctgcgttctcacagctgttgaacttggataataactgatgcctggagagtatcacacagtgtgtcctgcctaatgaaactacatttagaaccaaatttcaaaaaatcgttctttctttctctcttttttttttgagacggagtctcgctcttgttgcccaggctggagtgcaatggcgtgatgtcggctcactacaacttccacctccctgattcaagtgattctcctgcctcagactgccaagtagctaggattacaggcacgtgccaccatgcccggctaatttttgtattttgagtagagacgaagtttcaccatcttggtcaggctggtctcgaactcctgacctcaagtgatcctcccgtcttggcctcccaaagtgttgggactacaggcatgagccaccacacctggcctcaaaaaatctatcgtattatttcacttcctgaaaatttcatagagcactagactttaaatccattttctgagatgagattaggaatagagaaacccttagagacagaaggtagatcagtgattggcaggggctggggtgggtgggcagagggtgatcattgatggggatggggttccttttgggctgatgagacaattctggagctagacagtggtgatggttgcacagcatggtgcatgcatgtcttagtgccatgaaattgtgcacttcaagatggtaaaaatgatgaaatttatgaatgtgcattttaccaaaatagcaatatctgtgtaggagttgaattctcatgattacttaatgctctcccttccctggagcaaacaaatgtcctggggttaacaagaaaaggtgttgggggacaactgtaggttgtaactatttttctctatctttgtgcgtaattatgatgaagggctttaccttggatcttgtctggacaggaaaacataaataagttattgttgcatcagattttaggagcttcacataagtatcctatttaatttacagttgggaaccatgttgttccaattgaaaaaaaaactgatttcacttctgcacaatgatttcctggagatcagaatccaggggagcattaggattttaaatcagaacatatagtcaggtgtagacagcggaagagtaacagggtgggttgatttccactgtgctgaattcgatgctgctgaagaagtggcgtccaggatttggatgagggttttggaagggatgggtggatagactagaaactttgatcgggctcatgtttttttttgcagacttctgaacagtgaatctattattgaggaaaaccaaaggaggcctgtctagataggtctcaattagacaccagctactggaagaactttctcagagactgactgaaatattctccaccagatatggctgcaaattgcaactcctcatggggtcagggaggaccctgcaacagccctgagtcagagccgccacagtctgtggcttccccagaaactcaacttggaaatcatgactgggaccctgagacttgtcacgtgaacttcaggatgttcagctgcccagaggagtcggaccccatccaggctctgaggaaactcactgagctgtgccatctgtggctgaggcccgacctccacaccaaagagcagatcctggacatgctggtgatggagcagttcatgatctccatgccccaggagctccaggtcttagtcaaggtgaacggtgtgcagagctgcaaagacctggaggacctgctacgaaataacagaagacccaagaaatgggtgagtgggaccctcgtgactggtgcagggaaggggagctgggatgggggctgcacggtgcagctggactcgagaggacccgaggggctgctctaggtcagggcttccaagtagaggagagtttgcccatcagggacacatggcagtgtctggggacagtttttgttgtcacaagggggaggacaggagacgctgctaagcattctctaatgctcaggacaacccaccatgacaaataatcttccagattccaatatcagctgtgctgagacggcaagttcctggtgtaggagatggacaggcagagggggtacagggacccacacactgtgtgaggccaacatgaaagaaagacattggtgaaatattaggtctgatggaatgtagggaaggaggcattagagtgaactgaagcggggcccaggagtcccatcctgaagcagggaaagtggttggtatcagatgcagggatctgcctccaggtccccaaatgagcccctaagttctaatacaaggtgagctgccatcggccaattgagttggattcacccagaatatttctccttgtcttctctttggtttagagaccctttcatctaaaggactcatatttatgtacttatgtagaaaaggaaaaaattcagacagattgctgtgtccacagagctgattctgcattgggaaggcagatttgaacattacagtaaagtgtgagcattatggcaggacccagggaatatgagagctactttcaggttctcatagtgagtctgattgtcttttttctctctacagtctgtggtcaattttcttggcaaggaatatcttatgcaggaatcagatgtcgagatggctgaaatccctgccagtgtcagagatgatccgagaggcgtgtccagccagcgggcctcctctgtgaatgagatgcgtccgggggaaggccaggccagccaagagctgcagaccctgcccagggtccctgcactgtccagaaggcaggtgagtgtgtgaggccctggtgtctgggcagaggtgggagaaggaacaggagaaaactgagtgtgcctctggactgattgagagatttggcacaggacaagaacagagacattccccatggatgtgttacatccttagacattcctgagtcatcacagagaatgaagcctcatctacttttctctccaccatgagagcttttagcatgtagggtggggggtcagaaatggtctcagtgaaatgagggaggcagttggcaccgatgaatgaactgaaggtcccttccccattcagtttcctcaaagacatttaatgtcataattcagcaaggagcgcactttctacagattgtcaatttcttaatttgaggagtgtttctcaactggggtgattttgcctttcaggacacatggccatgtctggagatgtgtttgtgtgtcattgtagggggtggtggggtgttgatagcatctagagggtggaggcggggtctctgctctgcacaggagcgccccctccaggagggtgatgcagccccaatgccagtggtgccaggggttaggggcctccacctagagtcatgctccttccagtgtcaggggcagggagacgttggcacagcggggagaaatatgctcagagaaccaaacagtgaaaaccaccaggcacaggagctgatttagaatatggagggtgcagattagggagagactcagaaatgaggtggtgatgtttatttgggatgatgtgggaggcccataggaagtctgcacgtatccctaaacctgtgtcattagaaaagttggtgtatccagtcaggaagggacagtgatgtccatgacccaccagtttagacagggcagtcattgctgttggttttccattgtcaggaagaggacttcctgctgccagagactactgtcatgaaaagtgccccaaaggctctgagacccaagccaaccttggagaaggatctgaacgtagacagggaagaaaacacgggacttacatccccagagcctcagcttccaaacggtcctagtgagtatgaagacttggatccacaggggttagcccctctcttctggggtgtggggctggggtcccagcattatcatgtctgggggagttggcactcagctgccaaagcctctccatcccttactctccagagacctacggtccaatgtcttaggtttaaggttgaggggaagttgtcagccaacatcagtgtttggttgcaatgagtttggtgtattgaaaatgtaccttattaactgttgtgtgtggaatcccttcttccagcaggtgtggtgggagcaaaggaggggaaggaacccaaaaaaagagcctctgtcgaaaatgtggatgctgacacaccttctgcctgcgttgtggagagagaagcttcgactcacagcgggagcagaggagacgctctgaatctgagatgtcccaaaagaagcaaaccagacgccacctccatttcccaagaagggcctcaaggaggagccacacctgtgggcaacagcgaatccccaggaaaacctgagataaattcagtttattccccaggccctgcaggtgcagtcagtcaccccaatggccaagaagccaaggaactgctgccctttgcatgtggcgtgtgcaataagaggtttacgtgtaattccaagctagccatccacatgagatcacacacaggagagagaccctttcaatgtaatttctgtgagaggtgcttcacgcagctctcagacctccgcgtccaccagcgaatccacactggtgagaagccctacacatgtgacatctgtcacaaacggttcaacaggatgttctccttgaagtgtcacaagaggagccacacgggggagaagccctataaatgtaaggactgcaaccaagttttcacctacaggaagaacctgaacgagcacaagctcatccactccggagagaaaccctataaatgtcccaagtgtctaagagcctttcgtcggcctgaaacgttaaaataccaccagaaaacacatcaagaaaccactgcacccagagaatgtgaaggatgatttttcactgacgctattagatgagatatgacatgaagcaggtgcaagggcgcctggcacacagagggagtgccctagataggaattgccaggatgtcggagtaaatattcattctccccacagagctttattttctgtttcattaggtccattgttttcgtacaggtttatgtgggtgtgtgttgctgttctttcttttattattttttttgagacggagtcttgttctgtcacccaggctggagtgcagtggtgcgatctcggctcactgccagctcagtctcccaggttcacatcattctcctgcctcagcctcccgagtagctgggactacaggcgcctgcca[195 bp omitted]aaaacggagccttctgattgacatgctattacccactgttttgctgtaaattaaagttgtcaaagtaggtgtccagattaaatacacaatgcctggggaaatctgtgtttcaaataaacaatttttttttagtatcagcttgttctaaattattcattatttatctgaaactcagcttctattgggtatcctgtattgttttcttttttgcttctttttcttctcttttcttttcttttgagatggggcctcactctttcacccaggctgcagtgcagtggtgtaatcacagctcactgcagacctgacctccacggctcaagcaattctgccgtcttggccgccggagtagctgggactagaacacaccacaccatgtcagctaatttttgtatttttttgtagagaggggttttgccacgttgcccagcctggtcttgaactcctgagttcaagtgatctgcctgcctcggccccccaaagtgctattacgggtgtgagccactgcatcctgtattgtttgtattaggctttattagtattattttattcaaattttttgaaataattttttgtagtgatgggatctggttttgttgccaaggctggtctcaaagtcctggcctcaagcgatccttccaccttggcctccagaagtgctcggagtatacgtgtgagccaccacgcctggctaatgactttttcagagctgttttaggttcacagggaaattcagtggacagcacagagttcccctagactccctccccacacggcacagcctctccccgcccagcatccccagcagagcggtgcacctgttccatcagtgagcctgcctggacatatcaccaccacccagagtccatggtgttcattagggctcgctctgggtgttgtacatcctgtgggtttggacaaaggcctcatgagtatccaccactggagtatcatgggggatattttcactgccccccccgaatcctctctgctctgcctatttatctccccgccccagatggtgtatttcttggtctaaatttggcaacttctaaattcctgatttgaatcttgaactacagaggcattgggagtctctggtgactagttggtcttagtgatagtaccacatcctgaaggctttgctaatctacaaaagggtgggccctgatcccagagcttccagtttagtagatcaggggtgtggccttagagtttgcattgaaaaatagacttcattttattttagaccaagtctcactctgtcacccaggctggctggagtgcagtcgcgcaatctcggctcaccccaacctccacctcccgggttgaagcaattcacttgcctcagccttctgagtagctgcaattacaggtgtgccgccaccacgcctggctaattttttatttttagtagagacagggtttcgccatgttggccaggctggtctggagcttctgatcttgggtgatctgcctggctcagcctcccaatgtgctgggattacatgagcacgagccgccatacctggccttagatttcatcttagaatatctttcaaaagtctatagagctcgccaatgctctgcaccatttcccccactgttcacatggttctttaatacggcacatttgccacaagcgatgagctgactctgtatattgctgtgaactcaggtgcctattttattgagacctcctcagtgttgatacgatggcctcctcttccttcttttccatccaaggcgccacattgccttgagttgtcatgcctccctaggctcctcttggtgaaaatttctcagattttacttgttttaaataacctgagcatctgcattttcagtgatgctgatgctgctggtcttgggagggtatttcatgaatggctggttgagctcacagaggcagagaccagagatcctcagaactccggaaataggctggattcatttattaaagttcactgttgtgacacctcggttcttgtcttcttaatttaaaggaatgtaaacaatagacacacagtaaaagagatgcagcatagagtaattcattgcaaaggaataagaaaattttgaaaggtaagggcagaatagacaggacaccctgagagagtggatttaaggctggctgctcctaaggataagatagcaaagacctgctcaagagcgactccctttctccatccccagacaattttgaaacatattgatgcctgactctcaccctcaagagatacgagtttgagtcgatacttggaaatcaggtttaaaaaatttttccaggtaattctaatgtgcaacaaaggttgagaaccactggtgtacagtataaagagaaatttctagcatctcgcttcatttactgtaacctcgtggccctcaaatttttaatgtgcatataattcaccctcagatcttgttaaaatgcagggtctgattcagtgacaggctccaggtgaggcacatgctgctcgtcaatagaccctcatttcagtggtgaggaggcagtctcctctgggttccagctttgcatcaactgagcaaaatcttaccatctcttactgctcaagtcagcatcttgaggccagtgtctgataagtgcatttgaaatattcaatccttctggtttcttacccagaatgctacactaagtgttttatttctcccacatccgctcctacccaacggctttccacccattatcacatggcagccatactgagtatgaaagtgagcaaatctaatcctgctgttacactctttacattttattttctatggattctattctttttagcaaaaagaccatgtgctttatgtggcctaagctattcaactaaatgaccactgatcccagcactttgggaggccaaggcaggcagatcacgagggcaaaagatcaagaccatcctggctaacacagtgaaatcctgtctctactaaaaatacaaaaaattagtcaggtgtggtggcatgcacctgtagtcccagctacttgggaagctggggcaggagaatcgcttgaacccgggtggcagagattgcagtgagccaagatcgtgccactgcactccagcctgggcaacagagctagactccgtgtaaaaaaaaaaaaaaaaaagaccactgatgacccttgtgactgtcagtctctgttaccctccgtacttcaggaagacccttctgtattcagtgactgactgggggtgcctttctccatgatgtttaatttttttgaatgggggatgtctatggcccatttttggtgcttttctgtgtagttgaagatacactagttttggacttttggcctttatccactttctagcgtattctttctctggggaaaaatgattgggagtttcgaaagagaatctgcattgagaagctgtatcagtcagagtccaatgaagagaaaaaaacccacagcaatttgcacaagcagcatttaatataaagcaggggctggcacacgatggcctgctaccttcaatagcccacagctagaaaatagttttgtgtgtgtgtgttttacagggtcttattctgtcactcaggatggagtgcagtagcatgatcatagcttactgaagccttgatctcctgggcaccagcttccagcaggtgattgtgttaagtgaaataagccagtccaagttatcctgcccgctcagcctggctaatttttaaatgtttttatagagacagtgtctcactatgttgcccaggccagtctcaaagtcctgagctcaattgatcttcctgccttggccttccaaagcgctggaattacagatgtgaaccagcacacctgggcaagaattgttttttatatttttaaagtgtggtaatatgagcaaaccagagaagaatatccaacatagaccaaatagcctgcaaaacctaaaatatatattctctgctcctttgtggaaaaaagctttctgacctccaaaataaagatttattgaccacaacatgggcctaactataaagaaaaaagaattctgaaggatacctagggaggaaggtttctcagaggaatgggaatccattgacaaattttaaagaatggagcagcacaattgggtttacctaatttaaagctcaacatgcctgtcaagtgataatggattggagggtgctgggtaagagaggatatgggagcaatcaagattctcttatggttttctgggagagaaaaaggagaactgatggattcaggtgcacctacccaaacctggcttgagcaggtgagaggctgtaacaacgcaaaggttggggccgcccaggagaaaaaggattacaccacccaaaattgagtttgaatgttaagactgaggacacacacatacccacactccaagagggtatgaagcttattacataacaggatttctgaagagagcagagtgggctttcccaagctggtctgaatgtggcttgagagggcagagaaaggaggctggtttggggttggggttttatggtgcttaggggatgggccacagccaggggtactgcacagggtttgaactccccactggcactagaagagggagtacccaggttttctaatcagcttgtccagctgtggggtgataagaaacaaacatcaaacatggtcaaacttttaataatcccaaggaaagagcaagtcaaaagtggaggtatgaacctcaacgtctgggtgaggcctctggttgggcaagggtgggaccatggtcaccaggggaaataggaggcagccttctggggtccaggggccaaggctggtggctggagtatggagaggcctgtggtaaggcagccacaggcaggagctggggtcgtgaacacgccagggggccccattcacgtggggctgacaaggccataacaggagcaagaagaaagacaagatggcggcgcagtggcgcctcttcctcctgggatatccctcccaccccctctagtggcagagcctagcactgcgctccctgcaaagttgccaggacagctccgtgattgcagggccggcactgaacctgtggacttagaagctgggaggcaattgactggtaactgacacagaagccctgttcctttcccttgcagaggtgtgagcctataggttcagttactctggaggctgaggtgggaggatcacctgagcctgggaattttgagctgtgattgtgccactgcactccagcttgggtgacagagcaagaggctgtctcaaaaaaaaaaaaaaaaaaagtcctctggatggtcagaagagcaacagaaggtgggcagggaggaggggtggagggggagagaaaaaaagatggagagagaaatttgtggaccccaagaatatagctcacctagaaaggttggaacacctgaaatggaagtagtggcttgtccgcaggatcatagaacttgtaaaagaatcccgtgcaccaaataaagcacgcaaataacaggaaaatgccagaaagctgaacacctgggtggcagtctgtgcaccccagtgaagggacgtgaacaagtggctcccatcggtgtgctggcaagacacacactggctggaggtgagggttgtgatattaaggactgaggtgaacagttttgaacgttgggatgtcaacagaatgaggacgcgtggggagacgttatccggtgttacagacactaaatacatttttttttcttacaataagaagttgaagatctgagtggatgagaactggagaaagtagggatgcagtgtctcttcgtcaattcaggttttgcacggggtaaggtggctgtgtctaagccggtgccactagcatcatacgcacccagcttatgttaaaaatttaaagttagaatgattttatagctaatttgtatagttatgacagatgtccagcagatggcagaaaagatcttgttctaacagataacagctagatggttctgcttctgtttgacattaaacataaccaaagcgtcaaacaacagaaaaggttatctaactgatataccagtgaatgagcatctttttttttttttttaaataagtcttcctcttctgttagtgtgaggctaaatttggtggttcatatgatggttcactcgatctgacatttttttcttgtactctactagaatgtatatttaaattttataatgaaatattttattattatacaaatcattgttgttggtcccaaagtattacataaactttggttgctatatataattacattctaattagtgtatagactattttatttattatacaatttcaggaggagaccaatgttttcatcatcttacctattagttgtaacaaattctaggataaactgctaacattattatattattttttctggtgtcaaatgaggtctttgtagcatgtgtcacaatgtcctccctttggaaaggggaataatattccattgtacagatggaccatattttgtttatctattccttcagtgaacgcttgggtagctcctacttctgagctattgtgaataacgttgcaatgaacataggagtatgagttcctgcttccaattttttaggtacataagcagaagtggcattcctggattatatcgtaattctatgtttaatttttggggggggctgccatgctgttttccttgtgtattaacagtataccagggttcccatttctccacatccttggcaaaatttgttattttctgttttttgatagcagtggtgtggttttgatttacatttccctaattattagtgaggtggagtgccttttcttgtgtctgttggccatttgtagaccttctttggagaaatgtctaagttctttgcccattttaaaatcatgttgttagtgttttgttgttgagttagcgttctttatatactctggagatgaaccccttttcagatatgtaatgtgcgaatatggtatccccctattccattggttgctttcactctgttgattgtgacctttgatgcaaaaactgtgagttttaaaatatatattttaaaatatatattttcttattacaattttatttaggaataagtgaggtacagtaaatggcacgttatcagtttatgatttgtcgtgttctgacattttcacaggctttctgcatttttaaagctgctcccattggaaacaggaaaggaacttccattttagttaggaaagcttttgaataatatttagatagtccaaaaaatacacaaagtgatatataacctacaattccaagaacgtcaatattgagcaaagcgtggacaatagccggctgagcgcacaaggtggggagtggggagggaagctatggatttgcctgtggtagggaagactttgcccagtcagccacagagaattagaaagtctgccgcccgctgctgcccacgagcaaacagaaaaacaaaaaacccaacctgcctcagtgctcacaggccgactctgtgccgtagcccagtgcaactctccacctgccatctcactgtttcactccctctaacgggtccacgttgattaattcccaaacccctcttgcctgtgacccaacgtggtttttccctttggctttttttttttctccctcaaagaagctgtttttcttgccagccctgagatgggttgaataaactgatcataattacacagcctacctggacggatgaaaaacatggtgtcgtctattctcagggtccctaggagggttgttagggtggttttaatgagtcccaaagcacctggctctatttctgcccgttgagctgctaaactggcatcaaaaagttaactctgaggaggcagaaaacatgatttgttaactgctggcctcaagggtgacttgatttatttcagggcttatttaaaaaacagtaattattgcctgtttccaatcctgaagataacatacatgcatgtagtgaatacatttggaaattgtattcccatgaaacttttaatgagatatttgaatagaacttgttaagtagctggtaaagttcagaagagaaaatgcacacacactaaaaaactagaaacacaataaaaagaaagaacagtcaggaggaaatgctttaaaatacagaaaaaaggataatggagaatatatgtcatccataatcccaccataaagagaggattttaaattttttgttgttttgtttgtttgtttgagacagggtcttactctgttgcccaggctggagtgcagtggtgcgatcatagctcactgcagccttgacctcctgggctcaagcaatcctccctcctcggcctcctgagtagctgggattatgggtgcacaccaccacacccggctaatcttttgtggtttttgtagagacagagttctgtcatgttgcccaggttggtcttgaactcctgagctcaagtgatcctcccaccttagcctcccaaccaaagtgctgggattacagagtaagccactgtgctcagcctgtatttttaatatgtagtgcatgtccttacatttttcaggtgtgtgcgtgtatacatatatacatacatgcattatatatattgtatatacacatatccacagacacgtattttaagatgcagaaaaacgggggagacactgaggagatttaaacatgggtgtggcatgattcaaatttcatatcattctggcagttagtgtggagacagatataggggcagcccctggtggcagggaccagtgggcaggtcacccagggcttgatccctgacatccagtcgtgtgacgattgtgtcctgagttcagggaagggctgttgatgaagcagaagaaatgtttgagaagcactggaaaaatccggagccacctgttttgcgatggattatctgttgcagatagtggtgaaaaaaaaaagcaaacaggtggttctgggatccccccgaaagggaaacccaagatgaggagctggtgggaaggggaaattaaatgctcatttaacttaacatgtgggatgtccagaggtgtatttgccatcaggggaatacctgcgtaagggctctggaatagacacctgacttggctatcatttctagcggggttagatagcccctcaaaagacagagtgtggagagaagagccacatgtcaggcttaggtccaagaggggcgagtttgcagaaggagtgatggcaggagagcggggaaccaggggcatcccaagtttggacagaagcaatgtgaatggacacgaaaggagagattcgagtgagatttacacgttagaatccctggaaccaggtgactgatcagggctgggagaacaaagggaggcaggtggagatgaacccaagggctgatctccacgttcccaacagatgtcacgggaggatacagaacacttgtccctgggatatggactgcagtgtccctgcagtactaaacagaccattggtatgtgggagcgagatgcccaccattgttacctggctgaagagctggtcccctttcacacctggctcctgcctcccaccactgcccatcttcttagacacaggcgccgggggactctgcaagcctttcacacctggctcctacctcctaccactgcccatcttcttagacacaggcgctgggggactctggaagcctttcacacctggctcctgcctcccaccactgcccatcttcttagacacaggcgccgggggactctgcaagcctttcacacctggctcctgcctcctaccactgcccatcttcttagacacaggcgccaggggactctgcaagcctttcacacctggctcctgcctcccaccactgcccatcttcttagacacaggcgccgggagactctgcaagcctttcacacctggctcctgcctcccaccactgcccgatcttcttagacacaggcgccgggagactctgcaagcctttcacacctggctcctgcctcccaccactgcccgatcttcttagacacaggcgccgggagactgcaagcctttcacacctggctcctgcctcccaccactgcccgatcttcttagacacaggcgccgggagactctgcaagcctttcacacctggctcctgcctcctaccactgcccatcttcttagacacaggtgctgggggattctgcaagcctttcgcaggttcccaggactcagctcccacccgcctcttggtgctataacagggtagtgagggggtgtggtttcagcacaaccaagcttatctcttctgtgagccttttctgggccaccaatagagtcttccataaatactgagcactgactacgtatcaggtctcgtgtgggcacaagggacactgagaggaaatggagtccttgtccttgaaggtctcaccttccagtgtgggggtgacggacacgccttccagtgtgggggtgacggacacgccttccagtgtgggtgttgacagacacaccttccagtgtggggggtgacagagacgccttccagtgtgggggtgacggacacaccttccagtgtgggggggtgacagacacaccttccagtgtggggagtgacagacacactttccagtgtagggggtgacagacacgccttccagtgtggggggtgaccgacacgccttccggtgtagggggtaacagacacacaaacacacttgctgtggtttttgaagatgatcacaacactctcccatctgatctgttcaaatgtgtcaggtcctcatcaagaggtggagttggatttccatccccttgcatctgggcagggctgtgacttgcttgtctccaacagaaagtggcagaagggacattgcgtgactcctgaggctaggtcagaaaagacgacacaacctcccccttaagtgcacgaaggcctcagttcccctcagctgtcccattgtccagaggctgccatgttgtgagggagccccacctagcccacgacacacggagaggacctgagacagcatgagaagagagagctggtgggtgggccccagctgtttcagtcacctggagatccagctctagtcagcacagaagagaccctgagcctaaccacccagctgagcccaccaccgatttcctgacccacagagatactaaaagcactgttgttctgagtcactgagttttggggtgatgtgttatacagctacagataactggaacagcattgtgtcttcccaccctgtacttattttattaattttttttttaaaatagagatgaggtcttaccatgttgcccaggctggtctgagcaacatggtagaaccatgaacttctgagctcaagcaatccaccagcctcggactcccaaagtgctgggattacagatgtgagctaccgcgcctggctgcaccctgtaattctgatcttaccctcttcttacctggaccctcgtacgatttccctgggatctcagtctctagaattcaatcagccttttctttgggatttggttcctgttcatgcctctcgtttacccgttctgtcctctctgccccttttgtttattgagaggcacttgtgagatctatggaggtatgcttgtggcgtgtgtactaaaaattttagtggcagaaaattcatgtgtttgagtagctaaaaatggattttaagggagtttcatactcaggatttgtgtgcatgccaagcagcttatctgaaagtaaatgaaaaagttgaccgggcacggtggcccacgcctgtcatcccagcactttgggaggccaaggcaggtgaactgcttgagttcaggagtttaagattagcctgggcaatgtaacgaaaccccatctctacaaaaaatataaaaattagctgggcatggtggcacttgactgtggtcccagctactcagcaggctgaggtggaggctagtttaagccagggaagtcgaggctgcaaatgagctgtgatcgtgcccttgcacgccagcctgggtgacagagcgagaccttgttttaaaaaaataaaaattaaaaaattgttaaatgctataaaaaatgtttttaaaaagaaaaaagttaataaaaataacaatgaaacaatatcggcaaggagaacaccactaacttcaggtttgagcctctgctctcaactagcaaaacttttctaagctctgtaatatctaccaaccatggacatattagagaatattttgggaaatatatagattttgttttagtaattaaatatttttttacttttttttttttttttttggagacagtttcactcttgttgcccaggctggagtgcaatggtgcgatctcggctcactgcaacctccgcttccagggttcaagcaattctcctgccttagccttcctagtagctgggattacaggcatgtgccaccacgcccggctagttatgtatttttagtagagatggggtttctccatgttggtcaggctggtctcgaactctcgacctcaggtgatccgcccgcctcggcctcccaaagtgctgggattccaggcatgagccaccgcgcctgggcttttttttacatttttttaatttcttttttcttttttttccctctggtgttgaaactaatataattacatattttaatgtgcagtaaaatatcagtaggacaaaaatctgcaattttattgtatttaggtattgcttaggataaagctacagtgaccatctaagtaaacaagttaatatgtttgaggaaaatcaatcaataaaaagtaatactaaggatacacatggaattgacaaaaaactaggaggtggtactttcttgagagaagcttgggaagccctgagctagaagatatttttcttttaatttataaacatttggagagcactcttttttgtaaaaattacctcacttaaactccacaaccaactgcaagaaactgttacactcattttatagaaatggaaaatgtggctgggcgtggtggctcatgtctgtaatcccaacactttgggaggccgaggcgggtggatcatctgaggtcaggagttcaagaccagcctggccaacatggtgaaaccccatctctactaaaaatacaaaaattagccaggtgtggtggcaggcacctgtaatcccagctacttgggaggctgaggcaggagaatctcttgaacttgggaggcggaggttgcagtgagctgagattgtgccactgcactccagcctgggtgacagagcaagactctcaaaaaaaaaaaagaaaaaaataaaatgtagggagcttaagtgacagagacaggaattaagtccaaagcctggctgatggccaaattgatgttgtctacaggatatggtactgatctcccagtggtagctcaggggctgtgacattcctagaacaggcatctaatctgcctccattaatcatggaggacttcctgaaggaagtgacatctgagctgggactttcccttagctcagggacatctttctcccaagcatggcccccactggtgaatgaaacctaattttctttagagagaaccctgttatctgtccagtattccccagaagaggctggataaagcacagatagctgcctgacttgaaagtgtctttcaggactggatcagatccaggagcaaattgagagagagagggagagagagagggagacagagagagagaatcaaaatacaactgaaaagtgtattaggggagaaaaaggggagaaaaagagattatttcttcagactaatatcctgtttggaaacaccaaaaactgatattattgaaaatttcacatgtaaaataaagagcttaaataacaattcaagtctaaagtttggctatcacaatttttctttatttttgtttgtttattgaggtataacttacatatagtgaagtgtacaattcttaaggttacagtttaataaatttttacatatggatagacggatagattcacataactatgacccagataagaagacacaatatttccagtacctcagaagtctccctcttgcccctccaatctgtgcctacctacaggtaaccacttttctaactttttttttgagatggagtctcactctgttgcccaggctggagtgcaatctcagctctctgcaacctctgcctccctcccaggttcaagtgattctcctgactcagcgtcctgagtagctggggttacaggcgcctgccaccatgatcggctaatttttgtattttttagtagagacaaggtttcaccatgttggccaggttggtctggaactcctggcctcaagtgatccacccgcctcagcctcccaaagtgctaggattacaggcatgagccaccgtgcccggcccacttttctaacttctatcaccataaattaattttgactattttagagtttcataaaagttgtatgttacagtatgcagtctcgtttctaatttttttttttttgtttttttgtttttttgagacggagttttgctcctgttgcccaggctggcgtgcaatggcatgatcttggctcactgcaacctctgcctcctgggttcaagcaattctcctgcctcagcctcccagtatcccaagtaactggcattacaggcacccaccaccatgcccggctaatttttttgtgtctttagtagagacggggtttcaccatgttagccacactggtctcgaactcctgacctcaagtaatccacccaccacagcctcccaaaatgctgagattacaggcatgagccactgcgcccggccctgattttcattcaacattatattgataaaagtcatccatgtggttgtatgtatcgatagttcatcctttttattgctgtgcaatattccattgatttatttatccattccttgatttatttatccattctattgttgacggacacttggattatttccaacgtttatctatatgggtaattatgctgtaagtcgttttgcatatgtcttttggtagaaacaatacttttttaaaaacaaatttagtagattataaattccttagtgatgggtaaggtaggagtatgtattactgaacatagagacacttggtagagactcctcacatgcacatctgaatgatgccttgggactaggcagtgatcctttgcccttcttggggccaggcatacctccaatgacttggtaacagcttcaactcttcttccaagaagattgcccacatactcaacatttagcattgggcttctggaatgtggtgatatctaaggttcttccagctttggcctacatgagacggtgagctgggtgaagtgcattttaagggcaagcgctgagctccagcttatgaggaatagccctccaatgtgccaggaacatgttatgtgccctctggaacaaataatatttcacttttccgaaagccagagctttgggatcccagatctagtaagaatcatcttattcatcttcctttcatctccaagccagaaggaggctcgttgaatttacagggatggagttgcaaagggcattaaggaatcctgcatctatgctatcaggacctaccagtcccaagtggctttgatagataaaatgttctgagtgccttaacccagaaaaactgcaactctagaccctggatgttctaaacgacgcaatcagaacatcttcccatattctttggaagaaactctaacactttcctctttctacttctacctaaaacatctgaaagaagggaggcgagagaggagagaattatgcatttaaacaaagacaaggaattgcgaaaatcaccatttttaaagaagtatagatttcataagaacctctgagatgatgataatgcatgataataacatgtaataacaataattataatagtattatgcttctatgagccatataaatattatatgctatacatattgctaagtgttttacaaccttcacctcatttatttccccctaaaagtctatgattttatgtaagaggaaaatgaagctccaagaaaaactttttttttttttttgagatggaatctcgttctgtcacccatgctggagtgcaatggcatgatcttggctcactgcaacagcactatcttggctcactgcaacctccgcctcccaggttcaagcaactctcctgcctcagcctcctgagtagctgggattgcaggcacccgccacctcacccagcttaattttttgtatttttagtagagatggggtttcaccatgttggccaggctggtctcgaactcctgacctcaagtgatccacctgcctcaacctgccagtgttgggattacaggcatgagccagcacacccagcccaagaaagactttttggacactatctcagggtaagggagtagcaggattgggatttacacctggatctgactctcaagctcatgctcattccactacagaaaatgacctgtttgttcaggtcttcctattaactgagatcttccatcttccaggaatgatgcagtacattccaagaaagatgtgttatggaagtgacatcagatctgaatcctgaagtcaaagtttcatttagtagaaatcaaggtaagatgaggaagtgttgggagactggactatgaagtatgaagagtctgtatcagaggctggcaaactatagttgaccatttgtttttataaataaagttctattggaacatagctagctccccttgcttatgtattgtctctggtggctttctcactacagtggcaaagttgagtaattgcgacagggaccatatggctaacaaagacaaaaatagttactatcttgctcttgacagaaaaagttttcctactcttgatctaggtcacac[133 bp omitted]gaaaccccgtatctactacaaatacaaaaattagccaggtgtggtggcaggcgcctgtaatcccagctactcgggaggctgaggcaggagaactgcttgaacctgggaggcggaggttgcagtgagctgagatcacaccactgcactccagcccgggtgacagagtgagactccatctcaaaaataaataaataaattaaataaatgcttatcctgtatgtaatgttgagccatggaaggatttggagtaggggagacacatgggcttatttcagaattacaaaaaaaccattctcagatccatcctagcacagggcactcccatgataaaggcatcaacaacacaattccaaaccatcttcacttctcaatctttcaccttgaataccatttcaacaaatattaattgagcatctagtatgcacctatactctatgtaagtggttaaagctgtaagcaagcagtaaggcttgaaacttaaagctggtggaaagtaaactgaggaagtgagctttctctttgagagatccaatggaaggaagactatgtacagaaggacagcagccagaggttgccttagaacacaaacagagctgaacttcttgaatcaagcaggttttttgggttccagtggcagaaacggactttggctagcttaaaagagaaatcactggaaggaactggcaaaggggtggagttcaaaggattaaagtgaaggctggagagtgggtttgggaaagagtgaagcctgggaaaccaagagatttctgtatcatgagccactcaacactctcacctgaaaagcattaaatctgcttcttccactcttgctttactcaattcgagatttaaagtgccaggtaagcagtctgattagcctggcttaggacaaaggttggttggctttagtgtaaaaataaggatctggtgcaaggagctttgagggaccctgcttgcttttcattatgagaaaatgggcacgtgcattaactatcccaccaggaccacatacagtggagcagaggtaattcttccaaaggaaatcagggtatagagacttagcagctaaacaagttcacaaatgtcaatcatacctgtatagattcaaatcctacctcttccaattattggctttgttgactttgggcaaagttatctcatttgcaaagagaaattataatactacccagctcttaaaattatgagctaatagatatgaagtgcttagaaccacgtctggcacatcataatcacccaattaagcttaactgctgagagtattatgattattactgcatgcttgctaaaaatagcaccaagtgatagagcccacggtgagatctaggccctcattccaaagctcccgctctttctgccaagccaagctgcctttgcagatccaacctcagttaaatgagatgataatgtgtgtgaagttgttggggcaggtgcccaaagaggatgctcaattactgtccaagactttcttcctctctccccaaagaagtgagtaggcttaggctttgctttctgcttgggagatgcccccacttttttttttttttttttttttgagatggagtctcactctgtcactgaggctggagagcagtggcgcgatctcggtgcctggttcaagcaattcttctgcctcagcctcccgagtagctaggactacaggcacctgccaccatg[180 bp omitted]gagggcccagggaaagcagacaaagaggaatgttcctggtttgtgcttactatcattctcacggcggagcccactcaggtttgttgacaatctggcccctgcctaccactctaacctctcctccctccacattcccatgagcttaccctgctccatccacaatgatcttctttctgcgtgtcaaattccttctgcttttttctgcctcggggtctttgcacaagctgttccctctgtctaagctactcttaccccagatcttcattaggatctaaactcaaatgtgaccatctcagtgaggtctctcctgacaactctagctacggcagcatctcaaccccatcggtctctaacacatggccctatttcagtttctttgcagcaatgaccagtacatgaaattatatatgtgtttgtcaatattgttgtttgtcttcctacaccagactataaactccacagggttagagaaagtgcatccccaacaccgagactgcttggttcacagagggtgcttttacacatatggctctgtcagaactgtcatagcaaccctgttaggtatatagtctattaaggctgagaggcgcttagtatcatgatttagagcagcactgtccaatatatgtagctatttagatttaccacgtagctatttagatttacatgcttcataatgaaataaaatgaaaacttcatttccttagttgcattagcgtcacctcaagtgctcagcagccgcacgtggctagtggccaccattctgggtagcacggatacaggacattcctatcactgcagaaagttctactggacagggctggtttagagcattcactgcagattcatatacttagcttcgaatcccagtcctgccaattactagtggtgtgattctgagtggaccttatgcttttagatctcacttttttcatctataaaatgacgctaataacagttcccatctcatagtgttgtaggagttattataggcaaaggctcttagaagagcatctgggatgtagtcagtgctagaaaaagtatcgactgttgctatgacacctccatttttactccctgagaaactgaggtccaaagaaaagaaatccttgtcctagtgcacacagccaggaggtggagggagctgaggtttgatcccgcacctctatgatttcagagcctggctaaatccgatgacacttttcaggtcccttctgggaaaaatccctgaaacttctgacccattgctcccttatctgtttagtgggggacagaagactccaagggctcctctatctaggatagatgtgaaggaactgactggagagccagccagagcccaggacatgggttgtctattctaggacctagtcagtggcttgggactccttgggggttgggaagccaggctgcccaggacacagaagcattggtgtggctgagccagtcatgccagctgcagccgagaccccttgtgtgggcgctgcccctgtgggtgtaatggcccctgcggcagggacagaatgctcatccctcccacctgctcaagctctgggactgccccaggaactgtacagaggggttgaactatttccacttgtttccctgtagaagcctcagatgctgctgctgctgctgctggtttaatttttaaatttagttacttttaatactttttaaatttagttacttttaatatgcacagtccctatgcttgtactgttttctttgttttgttttggtaacatgggatttttaattgctatttttagagcttttaacacatttttctacatttaaaacttttttaattgaggtaaaattcatatgatataaaattaaccattttaagtgtacaattcagtggcctttagtgcattctcgatgttgttcaaccgtcacccacatctagttttaaaacactttccttacccctcaccccatctcactaagcagccattcctctttccctccccattcctagtccccgacaaccactatctactttctgtctctaaggatttacttgttctggatattacgtatcaatggaatcatacactaggtagtcttttgtgtctggctgcttttactttgcataatattttcaaggttcacccatgttctagcatgtatcagtacttgatttctttttacagttgaataatatcctattatatggctataccacactttacccattaatctattgatggacattcgaatcatttccatattttgactctagtgaatagtgtcgctgtgaacattcgtgtgtgaatatttgtgtaattacctgttttccgtgctttcgggtacatacctaggagtggactttcagggttatacggtagccctatatttaactttttgagaaactgccaaactatcttctacaggggctataccaatttacatttccaccagcaatgtataagagctccaatttctccacatcccctcaatatactttaaaacattcacaattatatggcataataatataataattaatgataataattgttgctatcattaataggaggaaaccgaggctcagggatatagtcaattgagcaagtttatgcatctgtgaggcaggcagaataattgtccctgaagatacccacatctgactcctggaacctgggagtgtgttactctcagatgtgataaaaataagactgttaatcagctgaccttgtggggagattatcctggattactggggtaggtccaatgtaatcacaaaggatcttgtaagtgaaagagggagggaaatgggtaacagagggagacggaatgatgaaaacagagaatcagagcaatgtacggtgagaaagacttgaccggccatcgctggcctgaaaatgggagagggttggagagagatttgaagacgccatgctgttggttaggaagatgaaagaggccgaccaggagtcaggaatgtgggcagcctgtagaagctgcagaaggcaaggaaacaaattcctcctagagccggcagaaggaatgtagctttaccaaggcttttcactctatcaacccatttcagacttctcaattccagaactgtatgataataaatctatgtcgtcttaagtcacaaattttatggtaatttgttatggtagcaagaagaaactcaggccagccgtagtgtggtggggcagggattggcatccacactggattgactcaatgtctgtgattctaactgattggctgtctgtgactataacaaccaggttttttgccgtctccaggtccagcaccacttccctgctccacatagacatgagtggatctcacaaacatcacgctgggtgaaaaaaaaaaaaaagatcccagcactatgggaggccgaggtgggtggatcacgaggtcaggagttcgagaccagcctggccaacatggtgaaaccctgtctctactaaaaatacaaaaattagccaggtgtggtggcgcacgcctgtaatcccagctactcaggaggctgaggcaggagaatcgtttgaacccaggaggcggaggcttgcagtgagttgaaatcgtgccattgcaatccagcctgggcgacagggtgagaccccgtctcaataaataaataaataaatacatacatagctagcaagttgtgcaagaaagattcagtgaaacaccatttagaataaatgtaaaaacacacaaaataatattacatacgtgtactggagccagcttatgagggtcaattgttaacgttttcagttttctacatttaaaacatttttaaattgaggtaaaattcctcattttagctgcttgcctaacatagcccaatactcaaaactaaattgtataaacttgaacataaataagttataataaaaatagagtaataagcactaaaagctcatcacttcctagttgtggctccccaaacatggtggcggtggtggttggtgtggggtgggtggggcaggtgctactgtgtaattgatagggaccagagatgttgctaaatatcccacaaagcggaagacagcccccaccacaaaaacgatctagtcctaaatgtcagctgtgccaatggtgagaaatcctgatcttccctaaagcatgagttcctcatgagcaaggccagtatctgactcatctctgtccccagatcacagtctggcagagcagataatgctaaagaatattaatgatgttctacatcccaggcatttgttgcatttaaaccctagtgttatgagttagggactgtgattatatttgataaagcaaagaaacagctgtgctggtaatgaggctgctaaggaaggatggaaaatcgaaacgtaggactaatcagagaaatccaaatatgctcccccaaccaatcacaatggcctctaattaaccactgccagcttccttatgccaacggcctccaaccaggcactcttgaagccttccctttctttcactataagctttcccactaccctgcctgcctttgagtctgtgccaaacacaaatggtgtcagtggcctcccttattacagcaagctctgaattaatagcctttgcttgttttcattgggtggtctttacttccgcatagcaccggatgtgaaaagccttccacatgttttacgccttgtttcttctgctcattataacaaatcctgtagtatcacgttttcccggtgatgagttgccaggaccatgtgctcacaaaggaggggagctctgaaatatggcaaatggccaacaagaactctctcctccagcctagtctgaaggatcgctgaggtatcccctaatgtacatgagatggtccagcttgtactagggattgaaacatagatagcaccagagatggcggcaggagagagtcccctgcaagagtggacatccctccacacctggaactctttccttccaggacactacacacaaccctctgtttctatcaggcttgaaggaagtaccatagaaaccttcagagcttagatagaccagtggtctctacactctgcctttattccaggagtccagagggatactgggtcaagttcatattcccactgacagctaaagttcttgactgtcaaagcaatttctaagaattaccagtggaaacagttagttccctgtggctgctatgaaaaattattacaaacttaatggctacaacagtacaaatttactatcatacaggtgtgatatgatagtatcacattagcctggaaatatcattatcccaactttatagatcaagaaaatgaagcacagagtggttaagtaacttgctcagggtacatagctagtaagtgctagaggtaagtataaacgtagacatctttggaaaggaatatacacaaaaatgtaaaaacaatacttacttctgagtagaaatacgatagatgttgtttgcttgctttgttgtttttctgaaatttacagtacgtctaggacaggggtccacaaacgttttctataaagggccggacagtaaatattttaggccttttggcccagatggtctctgtcacaactacaaagctcagtcttgcagcctgaaagctgctgtagacaatacatagtgaaatggcatggctgtgttccaataacactttattcatggacactgaaattcacattctatataatcttcatgtcatgaaatattttcttttgttttttccctccaaccattaaaaaaggtaacaattactcttagctcataggccctacaaaaacaggaggagggcaggatttggccagcagatcataggatgacaagcatcacactcagcatgaaactgttctaaaatgttgctttaagatgaaaaagcagatacagttctttggtcagcagttggtggcgtgggcacaggtctggagacctgccagcctccaggcaggctagagggcaggtgtgggcagttagttttgtccctggagcctgggaagacggtgggtgaccagagagtcctgtctatcctaggaggagaacattcagcccaaatcccagccccatcatgcacagatcagagccatttctgaaaatgtcgctgctgattctgcttttcctgggattggcagaagcctgtactcctcgtgaaggtaatgcttccagccatgccttgtgtcctctatgtattttcttacaacttgggaggctcttgtgggctggattcagagagaagctcctgaagtctaacagacttcttcttgcttcccatttagacattcacatttcccttgatggacacagtggggtgaatgagtctaggttgctagcccctgcccttggagatacacttgtgtctgcatcctggtttctatcactgattctgtgactttggggagacactgcgtctgcaaaccttgctgtcctcatctgaccaacggggctcacaagaatccccagttcatgggactgttgcatgtcattgacgagcttacgttgtgcagtgcctggaagtcaacattaccatagttagataattctagtgagactccagacttttgcgacgtaaagacaccaaagagtatattgggaagaggacttgggtcttgccataactctgagttcccatttcctcattcgatccacaaatgtttattcctggttctttccacgggcttgatgctgggaatatagtgatgaaaatagttctgtcttcatggaattctcatgctaaacacacacattctagtgtggggattcggagatggcctctctagaaaagtcacatttgaggtaaggaataggagctggccagctgaagagttaggagagactattccaggcagagacttgaatatgcaaaggtcctggggcagaaggcactgagtccctccatcagagagaggccggtgtgtcaggaacgtggtaggcagaaggaggggcatggtggtgagactgttacaagtaagaagagacaggaggcaggaaacagaacagacgggggcatgtgagtcacaggaaaaatgttggatgttatcctcagggaaaaggaagctgtgaaagggttttcagcaaaggagtgtcatatttaggagcgtgtgtgtgcatgtatgtgtgtttctgtgtgtttaaacaatgtgtcttgccctcaggaaagaatggattaggtgggaatcagattaggggcaaacacacaagttagaaaacgttttggtcatcagggtgaagatggggataagtagaaggttacgaggcactgaggaaacagctcacaggattgagtgatgggtcagatgctggtggttggggatagagaagcatgcagaaaggctctctttatacatacatgtatttgcaactggggaattgaggctgcccttaactgagatgagaaaactctgtagaggtcgggcgcggtggctcacacctgtaatcccagcactttgggaagccaaggcagctggattatttgaggtcagaagctcaagaccagcctggccaacatggcgaaaccccatctctactaaaaatacaaaaattatccaggcatggtagtaggggcctgtaatcccagctactcaggaagctgaggcaggaaaatcgcttgaactcaggaggtggaggttgcagtgagccgagatcctgccattgcactccagcctgggaaacagagcaagactctgtttcaaaaagaaaaaaagaaaaaaaaaaaaactctgtagaggaacacgttttttaaaaaatttattttgaaattattttagacttgaggaaaagtcacaaaaattaagtttctgaatattcttcacccagttatctcagctgttaacatcttacctaaccatagcacaatgactaaaagcaagacccaacaccagaacaaaactattaaagaaattacagacctcattcaaattttactaatgtttctactaatagaaaaactattctatttgaggatccaatccaggatcccaccttgtattttcaattaagttttttgttttgttttgttttgttttgtttcagaaaatccagctcttgctcaaccatgttgcattttgttatcccatctcctttggtcttgtgatttgtccttaggatgtgtgattgaacctcctcaatctttgtctttcacgaccctgaaacatttgaagagctctgatcagttgttttgcagaatttctctcaatttgggtttgtctgaagctttctcatgattggattgagactatgcatttagggcaggaataccacagaagtggtctcacacccttccccgggaattatatcagggaccacatgatgttgatgtgtcttattacccatggtgtaaactttagtccctcggctaaggtggtgtctgccaggtttctccactgttaagttactattttccccctttgtaattaataaatacgctgggggagaaattttgaggctatgcgaataccctgttctcctccaatttttgcccattaattttagcatccatctgtggatcttgctgcagaaatgattgctacagtgcttctccaatggtgattttctattccccttattcatctacatatattcaatggcctttctctgtaaggaaaagctgacttttcttctccatttatttattcaagtactgtatttatttatatcagcgtgaactcagggatatttatcgtattggttgggtgcagtggctcaagcctttaatcccagcacttcgggaggccaacgcaagaggatcacttgaggccaggagtttgagaccagcctgggcaacatagtgagactcatctctacaaaaaatagtaagaataaataaaaagtattgcattaacagattattttttgatggataggagtgtgatgaccacagattcttttttgaacaggctaagcttgaagcacctgtaagatgtttgggacatccatagatagcaagttctgtgagaacagagtttggggtgtctagtgtactcttataccagaacttctcttcccaatcagccttgcaaatacctacagagcaggggctgaatctgatttatctgcgtctccaacaccaaacatgggccaatgcccagagcatgtaccatgtgaatgttggttggatggatgatgaacgaatggacttatcgatggatggatgggctgatagatgggcccgagtagctttattgatagcagtgagtgggtcagctgatctccagggacacttctatctctggtcttcttggttattgcactgatctgagtctaatgctaatttctctctctgctccctgctcccgttgtgaactggctggctgatgcttttgtctccagttgcaactaaagaaaaaagtaagaaccgtggaacccccaagtctgtattttcatagctacctctcctaaaattcttttcgatcttgcaacctctctggcaattctggggaagggtggcacttggatctggtgcacagacctgccatggggtctggacatgactcagaaaagcaaacctattgtttgcttacagtgatgctcacaactaaaagagcagccctccttcactcctttgtctggggaagagaggcctattcggaaaatgaagagcatttatcagggaagagagacttcgggcagatctccattagaataacaccttggcttatgtttaacaccagctggtggtttgcaaacttcatggtcttagggccactgaacacgcgaaaaaaattattaaggatctaaagagctctttttttttttttccagtgagggttatttttatttatttatttatttttgagacgagcctcgctctgtcgcccaggctggagtgtagtggtgcgatctgggttcactgcaacctctgcctcctgggttcaagcgattctcctgcctcagcctcccgagtagctgggactacaggctgcgcgccaccatgcccggctaattttgtattttcagtatagacggggtttca[131 bp omitted]ttgtaaattcaaggatttttaacttaaaaatatttatatttacaaatattataaatatttacaaatacaaatacttatatttacaaaaactatttctatttacaaataagcacataaaaagatgctcaacctcattagccatcagaaaaatggaagccaaagccacagtgaggtatcacttcacactaactaacgtggagaaatcagaaccctcatatgctgctggtgggaatgtgaaatgatacagctgctttggaaaacagtctggctgttcctcaaaatgttaaacactgagttactcagcaattccgctctaggtatgtgcccaagataaatgaaacgtaagtccacacaaaaacccatgcacaaatgttcacagcagcactattcctaagagctagcaagtgaaggtaatcctagcatgcatccattaatgaatggagaaacagagtgtggtctatgcatacaatggaatattattcacccataaaaagaaacaaagttctgatgcattcaacatcgtgtgtgagccttgaaaacattattctcagtgaaagatgccagtgataaaagatcacatattacctgattccgtttaccgtatatgaaatattcaggataggcaaatccatagagacacaatggacattagtgatttccagggggtgaggggtgggggaatttagagacaatgactaaggggttcagggtttattttggggtgattaaagcctctaaaactggtgtagtgatggtcgtacaagtctgagtatcctacaaaccactgaaatgggtgaattgcatggtatgtgaattatatctcagtaaagctattattcaaatatctattactgcattaaaaaaataaggataatagagactcagaaggaaggagggtggcagggaggtgagggatgaaaactaccttttgggtacaatgtacattacaaagatgctggtgcactaaaatcctagacttcaccactgcacaattcatccatgtcaccaaaaaccacttgtacccctaaagctactgaaattaaaaatatttgaaaaataaggataataaatatacatactgacataaataaaatgttttagtgaaatggctgtttccaaaccaaaaaagtttagtaagaaaggtattattttacatttttgcaaatctctttgatgtctagtttaatagaaaacagctgaattctcatttctgcttcagtctgtcacaatgtgctattttttttttttttagctttatgtgtttgtttattttggagacgtagtcttgctctgtcgcccaggctggaatacagtggcacggtctcggctcgccatgacatctgcctcctgggttcaagcaattatcttgcctcagcatccgaagtagcctcccaagtagctgggactataggtgcatgccaccatgcctggctaatttttgtatatttaggagagacaaggtttcaccatgtt[132 bp omitted]atctcacacagataaggagttggaaaagggaagatcatgcagacccgttttaggcagagttctccagagagacagaaccatgaagatatacatatagatacatatatagataaagatattgatagagatatttgagaacaaatttcttaggggaattagctcactcagttgtggggtctgcaagctgcagaaccaggagggccagtagtgtggctcagtccaagtctgaaggcctcagaaccaaggaagctgatggatggtctaactaactctcagtctgaggccaatggcctgggagctcagggagctgttggttcaagtcctagaatcccaaaagctggagtacctggagttctgacatccaaagccaggagaagggcatcccagctgcagaagggagagcaagaattgacccttactccacctcttggcttcagctgggcctccatccaactggatggtgctcacccaccgtgagggtggatcttccctacctagtcttccaactcacaccccaatatcctccagaaacaccttcacagacacacctggggcagcccaaacattctaatcaaatgccaaaccactcaggcttccctttcagcagaagacggatggactcagtgcctactgaagcattgagaataaacgtcttactgctatatgggtgccttagtcaagctgacaccccaaatcaaccatcacatcccctgaaaggatctcagggaccacctcccacccccaccaagtagtctttggatgatacttcgagaatttctgctccaagtcacatggaagggaaaaagatctcttttttttccacccctactagactgcaagactgtaagttcctagagggcagggactgtactttactcaatctgtttattcctatagcctagcaaaattcctagcgctcagtaggactaaataaatggaaagagccttgcaaaatggaaaggactgtgagaacataatttaatgctattatttcaggttgaaaggagataaaaggatccaatattaattaagcatttagcatgtactgagaatttaaaatacgtcatgcaatttaattttcaaaatcgtaagtgtcccatatggggtctgaggtttccaaagctctgaatcctcacactggaccatcatcatgagaatcacatgggaaactttaaaaatatttaatccccacaccagacttggtgagctaaaatgcctgcagataacattttgggttttttatacctaaaaagctagcctatgttagttccttcctatcttcaaaagctgaaccttctaaacctaaacaaatgcaaacatctcatgatccacactgtttttgtttcaatttaaaatattatgctgttttaattaaaatgttttatgttaaattattttattaatatttcaattaacaaaacagtatttacataaactttaattacatttaaattactaattaattattcaatttaaaacatcatgttattttcatttaaaataagatttccagggttcagaattaaagaagttctcaaggttatactggaaaaaactccttcccaacctattcactcatttcccttccccgaaagaatctgatattaattatttcttccagatccttccagagatattttatgcaagtagaaacaaatgtgtatttatatattcaaagtcctcttgtttctatttttacaaaaaagacagcgtattatacacactgttctgtatgcaccttacttttttcacctaataatacttccagaagatgactctgtgtcagttcataaggagcatcctcaacctcttatttatacgtttttggctgaataatatttcttgtatggaagtccacaatttgtttgaccagtcacatactaatggccactcaggttgttttcagtagtttgctcttttaaataatccttcaaagaaaaattcagcttacatgaaattagacatataggatatatatcaatgtagatctacatatttatatctgtaggattatacatggaaatatgtagaattatatctatatatagatatatatttctttatcatctagatataaccactgtcgtagtctgttttgggctgccataacagaatacctgagactggataatttataatgaatagaaatttattggctcatgtttctggaggctgagaagtccaagattgaggggttggcatcttgtgagagccttcctgttgtgtcatcctatgatcaaaggacagagagagagacagaaacagagacagagagctcagagcttcaagcccttttataaccagcatttatctattcatgaaagttgagcccttgtgacctaaatacctcccattaggccccacctcccaacactgctgcatttgggattaagtttccaacacatgctgtttggggtacacactcaaaccataacacatacacatttgacccttgaacaatgtgagagttaggggcaccaacctccagtgcagttgaaaattcacatataacttttgacttccccaaaacttaactacgaatagcctactgttgaccagaagacttactaataacataaacagtagattaacatatattttgtatgttacatatattacatgctgattcttacaataagggaagctagagaaaagaaaatgttattaagaaagagaaaatatgtttactcttcattaagtggaagtggatcattatcaaggtcttcatccttgtcatcttcacaatgagtaggctgaccagaagaaggaaggggaggggttggtctttctgtctcaggggtggcagaggcagaagaaaatgcacatctaagtggataagtgtaaccatgtagttcaaacctgtattgttcaagggtcaacggtgtgtgtatgtacacatatacatttacatatttatataaatatatatctgtaagattaatttctgaaactgcaaagttaaagaagggtttctaacactcgtgccactacaatgctatcgctgtattgatctttgtcaaatttatgtgacaaactacataaaaatagcgtcccatataaagatcgcactccatataacaacaggcaaataaatgttccatgaaggaataaagaaatgcatgtaaaaattaacagagatggatgatgttaatattaattccactctcttccttgaattttccatgttgattcactggctcctggctctgctgccccttccagtcaactgtaagtcatatctccttctccctacataaatggggagcccgcccttcaacctagagaaggaagggaatgaaagagagaggcaaaactgctgacgatcacattcaacctggggcagattcagatgtcctcaattcaaacatgacctcttcacccagaatctgcagattgcccggggtgggaacggtgcaactggatggactttgaggaggccaacaagcctctgtcattaggtctaaaactgggtgtgctgtcagagagaaagagaacctgtgtggtgttctgggaaatagctttgatcagattttcagtaggatcaatgacctaccacaatctaggggcctttgctctagaatgtacacctgggttagattgtgtgtatttattggtgggttttagatgagaaaaatatggtacagggtgggtaagacgtcttcctttcccagaattaacatccagtctccggttgagaagtggagatgacacttggttattatggagaccttccttatgctagaaattcagctggagaagggagggtctggattccccaggccactggtacccctgaagtttctgacttcagggtaaatgtgcctccaaaggggtccaatgcacttagaatgaattgcagctccccattctggttccctaacctatctcaggacctatggggtgcaatgaggtaccaaggatgacttaattcctttcatattctctctgaaccttcattggcaatatggttcccactggctaccatcggtcctgtccttcctgctgcttgtctgccaacagtgctgaaaggtaagcttctcattccatctctttccctttggggtctgtttgcctttgtccaaaagggatcattgctgctgaacttcgacttacgtttcttctctggtctgttcacagcttagcttctaatagcggaactagtaaaaccaagtgtggaattgtcctttgatgaacaacaacaacaacaaaagcccttttacttgtctcccctcaaagccacttgtccagaaactgagcactctttcatggtccgcacatggctcaaggaaagctattaggtctgagagctcaattcaggtctacctgacatcgataataatatttggttagacacaatgacttacatctttgctttctgaggtcaggtagtaaaagccaccatcatcgctgcctatttaataattcctagagatagcaatctggaacaagttaggtggaatgagaccatggctttgtcactgagtttgcaagactctggggcagaaggctaggtcaggaagtgagatgatgacttgcagaaaggggacaaggcccacattaggcacctttgcattcggagcctaattctgctccttcctaggtggggcaatcttagagaagtcacttcacctctctgtgcctactttgcaaggttaagtgaacttacggttgcaaaacattttcaactccataaatccagactttaccacctctttctgattccacgtccctgctcccactgcacacacacacgtacacacccttatgtatgaatccaatactattatcatcattattattattacgtacttcatattactatttctaactttactaaatgttaccttgagccaggagctaggctaagtactcaatctgcattatcttccttctttattgacacagatccaaacaggaaacaatatctccattttaaagagcacagagagttcattcatcatcccaaggccacccacttagtaaaatgtatagcctggatatcagccattcaatgcccacatcaatattcccaacaacgttaggcattaactaccagacgattttcagtgataccgagaaaggtgttgcgagctccataaatacagcactttccactagcaaacccagtgggattcttcaatacgtagcaagcctcgccccagttaacgttcccgttttgcagatgaggaaatggagacttctagaagaagtcagagagatctgagtttgagttcctgctttttcactcaccagctgcacaggtctctgcaaatcacgtaattccttggaggttcacccgtcctcaccagcaacatagggacaatatctgatctcaaagggctggtgtggggtaaatagaaggacagagcttggctcctctttctagaggcaataaaggatcatcttttcttctgttcctagcatgaatgaagaacggttcatgattactgtcccaacctctttctccactttggacgctcttccctgcatcaaatgcacgagggtcctcaataatctcacagcgttctgagtcttagtccctgactgctcaccatgcatgaccccttgtggattctacttcccaatctgttcccagcccccagcatctgacctcgtttttggttttctaattatggcttcgtctttgtgacctcttggggacaacattctggaccacgcatgtaaccttggccaccatgctgactctcctggatgggctgccatcagggatcataggtaagtaccttgccacttcacaatgcccccagactgtgcactttggcgggaaattttgggctttgctctagaatgtacaactgggttagattgtgtgtattcattggtgggttttagatgataaaaatatggtgcaaggattttgtgcaagaatttctgagtatctagtctgtgcctggactcatgcttgggtgatgggagcccagaagtggatctgatatgctcattctttataaactcaaagtctggtgggaaacagagataagtaaacagaaattagattagagacaagtgatgcttgctgtaatttttttttttttttttttttgagacagtcttgctctgtcactcaggctggagtgcagtggcacaattgtaggtcactgcagcctctgcctcccgggttcatgccattctccaacctcagcctcctgagtagctgggattacaggcacccaccaccatgtctgcctaatttttgtatttttagtagaaatgggtttggccatgttgtccaggctggtcttgaactcctgacctcaggtgatccacccacctcagcccccaaagtgctaggattacaggcctgagccactgcgcctggccttgctatgattgatagaggtaggaaaggggattaagtgggaataatgaggcatcatgactgaggcattatagccacacttcctgaagaagagtttgttacatctgttgaactgggagaaatccattaattaggcatatttctttctgctgcatttgcacatcatgtgttatgtcttcttcctcaggtctcatgagcagactgtcaccggatggtaagtgtcaggattgtatcttttaaacctggtctttctcttgtccgcaaggtaatgtagacttattgagtcatttatgcttttaggtagagtctaaagaacacttcaggtattatccaagcacatgttttgtttgaactttgatgtaatgaaaatctttattgctatataaggttacagctagaattttgcctaataattattatgctgtggagttttttaagttttataaatagcatatgcacatgggaaaatatcgaggaaacataaaatgaaagtcaaaatcattctcttcaccacattcccggctctgctctctagaagcaagcaccatttctagtctcacgtgtattctccccagaaatagtcatacacatgtatgtacatccttaactcttcaagttaaaagtactatgtgttttagtgatataactttacctctttcaaatacctgagaaatgcttcgtgtgtactcccataatttaatgagcctctggttcatgtacatttagttttttttctaatatatatgtttttagttgtttcctttcaccccattgactgggattcctaacatattttgatttgttttgtttgttttaatttttaaattattattattatttttgtatttttagtagagacagaatttcactatgtcggccaggctggtctcgaactcctgacctcgtgatccgcccgccttggcctcccaaagtgctgggattacaggcatgagccatcacgcccagcccagttttgttttattttgttttgatgttattataaacagcgctataatggaaatccttatccagtcattgcttttttatttttgcaaattcctatctgttaagttcctaaaagggaaatggctgggtcaaagggtatctgccttttaaatctggacagatgtttaacaaatttgcatcttcatatacagcctgtggggatgcttgtttccccacaccttcagcagcatgggatattatctaactttttatttatttatttagagacggagtctcgctctgttgcccaggctggagtgcagtggtgagatctcagctcattgcaacctccgcctcccgggttcaagcgattctcctgcctcagcctcccgagtagctgggactacaggcgcccaccaccatgctcggctaatttttgtattattagtagagatggggtttcaccatgttggccaggctggtcttgaactcctgaccttgtgatcctcctgcctcggcctcccaaagtgctggaattacaggtgtgagccccgcacctgacccaaactttttatttttgataatgtggtggccaaaaaacactgccccccatatttttttcacagacggactgaaccccaacaggtgttcttgctgcatctatgcaccgccagaacccccacacctcccattcttcaaatggacgtacagctttctccttaagtcaataaacttgaaaaagttgctttataccgcttgagtaagtggtcagcctcataaggaggagacaactgtgaagataaatatcatgaaaacaaaacgagattaaattataactagacactgttttctgccaaggctctttgtgtgaaggttgttcccgctgttcggtggaaataaacactagcaagtgttatgagttaaagatgcgttagtgccattttgagaatttctctctggttgaaagagaattggagagagaaaacctttctcaccatgtggtacccaaggagttcaagctgaatctgtgtccacgtgagatctgctcggcgtcactaagcactcatctctcactgctagagatgcccggcagagcgaatgctagtggggcttcccaatacatccatatctggaatttccacctggctccactatttaccagcacacaccacccaggacaagtctgttttcttcccggtaaaccaggattcacagcacgcactgcacagtgtggttgtgagattatgataaaatgccagaaacactcagatattagggagctggtgaaagtggatttgactccttcccacccccaccattccatggattctggagtctaaagtcttccttgtggtttctgttactcctgtgatgacagtttccgagttttgtccatcttaggtggtgaaaccaccatgcactttctctgttttcccatcaacctggaagtagaactctcctccttgcccatcgacctggaagtagaactctcctccgggggttcccccaagaaatgtgttgtgggaaacattttacggaaacctatgactgagttttgatggagaatgtcaggaacagtcagtccagcctcgagcacatggttcctcaccttaccaactctgctcacctctccttttcttcccttcccgcctctcctccctcccacattgcctgcggagctacacagtcttctccttttaacaagcacaataattcagttctcccccactcccatccccccaagtccacctaacccataaatatcagccctctgtgcaccaggagcttcctccttggaatgcagccggactttataaaaagcaaaatgttcttattccacatgtgaagtgcctgccacgaaaccaagtaccaatcgaatgtagccactgtcaggtataataacggcagggggttgaggcagatgtggaggaagtcacagactcatggggctagaaatcatctgagtcattaaacaggtggggaaactgagggctggaaggaggcagagcatcagaggcaaggtggccactaacagtagattcattcagcaccttaaatcagccaatgaatttccaagtatccctttgcatggattcttttaatccttataagccctctaagaggtgtaaatgccacaaaagctacagtgaccagctcgtcccaggacacttccagtgttagctctgaaactctcgcatcctgggaaccccttcagttctgggcagaccaggagcgtgggtctctcatttatgattccacttttctgatgaggagactgaggcacaaggagatggagtgagttgctgatggtcacgaggctggtgtggcagagccaagaagggagcacaggcccaaatgggtccatggtgtccgctgttcttaggatgaaggctgaggcccttaagctgacccacaggggtctgcctcactgagctccagatactctccagccacgtcttgtaccatgatcacctaccatcatgcccctgaggtgggctccttcaagcccccggcagctgcaggctccatccagcccaggaagacgcccacatcgttccctctgtctgcgacactttcctgcctcctcttccaaatttcttcacccagctaacccctgctcatcttccaggtctcagacacaacatcacttccctcaagatgcctcccctggtgtccccgcaaggttagcaaccatcacccccttataggttcccatggaacccagcaggtctacccagaatactcatcccaacgataccccacttttgatgcttttgctgtctgcttctctctgactagtctgtgagctccctgagcagctgggtctggcctgccttgctttccactgcaccctccataccttgcgtgatgcccagcacacaggagatgcctcataaacatttgttagaaggcgtgactgagtgcttaagtctgtgtcttcacccgtaaaatgagtgaattgggttgcctcatctccagtagcatttccacctctgctctcctctgactggtcagggatgcttagtcagtggtgtctgagacccgtgtcttaatgttgatttctctctctactctgcccctccgttgcaacctgggctgcctacattctagcctccagataggacagaagaagaaagtaagtactgtgacagtttttgtctctgaaattagattctcataaccaccgctgggccttcaaactcctttaagaaaatgccagggaagggttggtccaggccccagtgtttagccattcgcctggcatcaggagcatcatcagtacagattctgccaaagaatctaagctatgctgtgctggtaaatgtctaacaaccacctctgcaaggggagagtgggaaagggagccctggtttgtagcgactaccacttcccatggtgtaaatactctgaccatgcctgatttcaggatgctaagggtctgagagctgcattggacaattcctaaattttagtaattgtctcttgtaagctagcttcagcacctcactaagtgtaagctatgtctttttttatttggtgtagaaattgctccaatgcgagggagcttaccccattcattcctccaaaggaaaagtgatagtctggaggagagaaaggggccaggccctttacagaggggaggggaaatttcaaggaagaaagatggtggagcagtctcttcggaagacagacgtatttatactctagttcgggtaagacggagagagacccctcttcccatgagtactgatcctcgaggccaaagacttgtccatcttttagtacatgtcctagaaaactgtatggcacatagttggaccacacaaatgtttctcttgtgtgtggtggtctgtttgtttgtttttgggtttttttgagatgggttctcactttgttgcccaggttggagtgcagtagtgcaatcatagcttactgcaacttagaccccccaggctcaagcaatcctcctgcctcagcctcctgagtagctgagactacaggtgcacaccaccatacccagctaatattttacatttttgtagagacagggtctcaccatgttgctcaggctgatcttgaactcttgggctcaagcaatcttcccatctcagcctgccaaagtgctgggattacaggcaggagccaccacttctgaccctcacaaatgtttcttgtacctctaattcatgttatttttgctcattagaaggagttgaagaaaacgaatactggagaacctgcctctattatataactgaattctcccaagagcactggtcaaatggaacccaagttataaagagtggtttccccaaactggctaattatctgaaactttttcaaaaagacagatttctttgttctacctggaccttctgcatgagaataccaaggggtgggtcccaggaatctgtcctttcaaaaggtttctcaggtgcttctgatggtttggctcagatggtttgagaactactgagataaagtaggactcagcagaaaggcccactgcttgtttttataaataaagttttactgacacacaatcacacccattcatttaggtattatttgtagttgtctttgtgctctaatggcagagctgcatagttgtgactggggccatgtggcctgcaaagcctacactatttactgtctgaccctttagaggtcagacatttattgacctctgagctagagcagtgcttctcagggtctttgtttaaaattagggcctaggaccctacttcatatctaaagaaggaggatgtctgtgatggaactctaagctcttgagtttgcttcccaaatggtgattctttgggttggacacggtggctcatgcctataatcccagcactttgggaggctgtggtgggaggaaggcttgagcccaggagtttaagatcagcctgggcaacataggaagacccccttctctatgaaatataaatacataaacagtttaaaatagttttacgatattgaatggaggaataattgaatgtcctatactgctgattctattctcttgctcactcttctccacactgactccccgaatgctggttctgctacttcctccagtaaaaagtaagttatttttcctttcctatgggtcacttggaagttttcaggtgctgggaagaagaggcaactatccaaagaagggaatctttggatagttcttctcaatgtagaacacaagttgagagggaccctccatctgctgctcccctctctgaaggggtttcagggtgggctgcaagccccagattgtgtggagagccgtgagggtgtgtctgggatacggtgggtctggggctacatgcaggactgagtatgtgagcccttggcatatcacgtccccgagctcacaggaccgttgccccagaagacaagaaagcattgagttgtacatatttgttgggagggccattgagaagagaaccaaagaggggcaccttgctccttcctcaagctccctcctgaccctcgggggagaaatgagagagaaccctggagactcaaagggatgctctagtatcttcctaatctctggaagatgaatccccacggaaactgaatacctggggcttctgtccacctggattaatgcgtctctaaaggagtaaagtctcaaagaagcatctcgagtcacccaccctgggccccagcctatcgcattaatctggaagacactttatttctcttttttgggaagatctgttttgagaaccacagggtgggaggagctaggaagaaggcgttattaatttcttccttttcctctcctctccttccttccttcctccactgctgcccaacaatgcccactggatcttctgctcctggcatctcatctcaacagcactgaaacctaagagtcttgtttcacatttgaccccttctgttttgctcctgttctcatctctgccaagggaggtccactcttagccatggatcaactctcagcttttgaccatcttttttttttaaactcaagaactgggaaaaaatagctatattaccatcatcttcaaatagatgggatgtctcatggaaaccaatccctcctcgaatcaggcattcatgtaatgccatgatgaggatggtgatgacagtgatggaaatttacaaagagctttctaggtgccaggcgcgaggcaccagagcagcacttttcaatgtgttatgtgtagttattccccacaacttcttcacaaggcaagtattattcatctgcacttgactgaggtataaaggttaggtaactagatcaagactgggcatcccagtggtgacggtgggttacggatcctgggctgcgtgactcagctgcttaaccacggtgctgtgcttcctcccactgctgtgtggctcagacttattttccccaagaacatctctgaccatttcatcatgctgttccctgaaaaagtcactgtttgccacatgtgggtaacatacatcttttaaaaagtcttgaaattgtagtaaaatatacaaaacatgaaatttaccattgtaacttgttttcattttttagagacaggatcttgctctgttgtccaggctggagcacagtggtgcagacctcctgggctcaagcgatccttctttcttagcctcctgaggaactgggactacaggtgtgcatcatcacacctagctaattatttttggtttttttgtctgtttttactttttttttttttacttttttgttttgctttgttgccaaggctggtcttcaattccggggctcaagcaatcctcctacctcagcctcccaaagcactgggatcacaggcacgagccactgcacccaccttaaccactttaaagtgtgcgatttagtggcccttggtacacacacaatggtgtgcaaccatcaccactgactccagaactttataatcactgccccaccaaaaaaaaagtacccattaaacagtcagtccccattctccctctgacctcagccccggcaaccaccatttcactttctgtctctgcaagtttgaggattctaggtacctcatagaagtagaatcgtacacgatgtggtcttttgtgtctggcttcatcactcagcacagtgtcctcaaggttcagccacattgtggcctgtgacagtgcttcactccttttcatggctgagcaatactccattgcatggatagactgcattttttaatccaatcatccactgattgaattttgggttgattctacctttcggctgaggacacactcttcttttggtccacattcaaagccatctaaaccccagttctgagacaccatcctgtccatgccccacacccacctccaaaccccacttctatgcagcttgagcctcagtgaaacccaagacatcctgatctgaaaaaacaaattgaaaaatggtatcctgcagctcaagagcacgttctgggtaccaggcatggttgttaagtgcttgactcatgacagtccccaagtcatcgtccttgttttacaactgaaaacactgtggtaagagagggagagtcgcttgctcatggtcacacagccagtcaggtgcagagaataacttaagcccagtctggatcccaaacggtgctattaaacaatgcaaactcaaaagtgttcaaagcggctcagactaacgaggtccctgcctcatccctacactggaagtattatcattataattgtatgttgtatatattgtaaggaagataaaattatgctaagaaagggaaagaggaactggcagagagtgtgcactgtgggcgccggtcctgactgcaccactttctagttccgtgggcttcggaccctcgcctcctgaagggctcaggcccctggtcggtacaatgcacataatagttccagcctcatatggttgtgaggagtaaacaggatcatgcacttggcaggatgattcccaattggggagatttcgcccctcaggggacacctggcaatgcctagagatatttttggttgtgaggactcagggaggtggtaggggaggctaacggcatctaatggggggagtctcgagatgttgctacacatcctacaatgcacaggacaccccacccccacaacaaaaaaactatccagccccaaatgtcactcgtctggaggttgagaaaccccccgctgaataaaatgtctggcacgggataagagctcagcaagggtctgtgaggaccacctcatttacctttgttctgaacactcccatgtctgcaggaggcccctctgccttgctcctttcgctccttttcccaggcccttctccagcctccgtcctcatgctgcactgacagcactttgcaaactgaaagcagacccagcaggaaaatcccaaacacctgcctaagggcccaccaggtgccaagcagacccagccctgctccagtaacgagcaaaagccaaacccagcaggaaaatcccaaacacctgcctaagggcccaccaggtgccaagctctgtactgggcgattcacgtgggctctttctcccggaccctcacattaacccaggatgcaagtggttcggtggagacagcctgagttttaaggcaaagaggcctgggtgggaactctactcccatcatctataatgtgggcgtaacttacccaaactcccttagattctattttcctacctgattaatggagataatattttttgcttgtttgagaattcagtgacataaggcagggatcaatcagcatttttttttctgttttctgtaaagcgctaaatagtaaacatcttaggctttcagggccaggtggtctctgctgccactcactactcaatgctgcctttgtggcctgaaagcagccacagacaacacacagtgaatgggcatggctgtgtgccaataaaactttatttacaaaagcagtagacaacacattgtgaatgggcatggctctgttccaataaaacttcatctacaaaagcaagtgtcaggatgtccacccaccgatgaatgggtaaataaaatgtgtctattcatacaatggaatgttattcagccacaaagaaagtgctgacacaggacacaacataaacgcgccttgaaaacacagtgctcagtcaaagaagccagacacaaaagcacatagggtatgactctgtctctacgacatgtccacagcaggcaagtccacagatagggaaagcagcttagtggttgcctaggaccgcgggagaggggggtgagcccagagagatggggagtgactgctcaggggcaccaggtttggaggcaatggccaacgggtacacggtttctttttcaggtgatgaaaacgttctaaaattgtttgtggtgatggatgcacagctttgtgaatgtcctaaaaactactgtcttgtacacttgatgggtgagtcataagttatgtgaattatattaatataccagtcaagttgttattaaaaaacaaagttcagaaaacaacaacgggtggtgggatggaatgtgccacccctggatgagtatgtaggtgcctacattagagtgacacaaaatacatggaaaaaaggcctggcatggtagctcacacctgtaatcccagcactttgggaggctgatgcgggcggatcacctcaggtcaggagttctagaccagcctggccaacgtggtgaaacctccgtttctactaaaaatacaaaaattagccgggtgtggttgcgggtgcctgtgctcccagctactcaggaggctgaggcaggagaatcgcttgaacccgggaggcagaagttgcagtgagccgagatcgtcccactgcaccccagtctgggcaacagagcaagactccgtctaaaaaacaaaaaacaaaacaaaacaaaaacaaacagaagagatgggaatggcgtggcggcttccttcccagcctaaccttgctgcggtgcaaatcctgcaagtcactgcacgtccctccaacccacacgaagcagcctctgactgttctgcgctgttcactgtggcatgtcctgactactcagcacgacccacccagggctccgctctcctgtgctcccatcgctctgtcttctgatgttgtgatttttccctacatgtggcctcctcttccacggctcctgggaactccatactctgggcctgtctgctcccctgacctgtcttgcttcctggaccccatctccttctggatggacatcatcagagatcctaggtgacacctcactccatgcctgccccgggactctgtaggaagctggtttgggaggaatgctttttagggctgggcagggtggtggaaagctgaaagatggatctgacaagctcacaccctcacgtcaactcacagtctagtggaggtggggagatggaaaagtaacaggcagttaaactacaacaggaatctgtgtggcacaggggggaggtggcagtggggacagtgtgcaagaggacgatgcgggcaatccagcagggcttctcggaggaggagtggcttggggcgagcctgctggacctgctggtctggaagtgtttatcatgctgtcccttctgactcgcgttgtatgcccctgtcctccttaggcttgctgagcctccaagtactgcatggtaagtctggtgactgctatttcgtgttcactcctgtgcacagaaatatacaggtactggttttttctatggtggggggtcccttaaatatcatcagaccctacactctttatccgtatcatcatctgcatcataaatgtttaacatgtttttatttgtccaacagatattaactgatgttagctctcctgtaccaaatgttattctaggtgttagagatgcagcagaggataaaacagacagaagtctgtgaccaagtgaaacttgtattccaatcagaggagaaaaaacaaagagcagtagttataggtctgctgaaggctattatgtcctatggagacaatagagtaatggggatggaaacgcagtgcgggaaacttaagttttttggctgggcatggtggctcatgcctgtaatcccagcactttgggaggccgacgtgggtggatcacctgaggtcagaagttcgagaccagcctggccaacatggtgaaactccgtctctactaaaatacaaacaattattttgaaacaaattttgtaaacatagaaaaaattagctgggcatggtggtgtgcacctgtaatcctagctactcgggaggttgaggcaggaaaatcacttgaacctgggaagcagtggttgcagtgagccgagatcatgccattgcactccagcctgggtgacaagagcaaaactctgtctcaaaaaaaaaaagtttttaaagggcgatcagggaacatgacatgtgagcaaaggcttgaagaagaagggcaggtgagccagagataactgggggaaaggcattccaggaagagagaacagtatatgcaaaggccctgaggcagctgagtccctgggatccagggacacagggagactaactttattctcttctctcctcattcgaggcacctggaagcactatttagagtttggtctccacccacttcataattcacctgatggtttcttttcttttcctttcttttctcctcctcttcctcttcctccctccctctctccctccctttcttcctttcctcttcctcttcctccctccctctctccctccctttcttcctttcctcttcctccttctcttcctgcttctttttctcctccatctcttcatttttagaagaaacaagtggctgcaaggaggaaggtaagtgcttggggtcgtaccattcctcatctataagacagtgtgtcccttctgtctgggctatgataaagccttagaagagaagatttcaggtaatcaaggccctgcaggggctttggtacctgagaggctgccttcctgaagggcatccaaagtctgcaagccactgcccctttcacactgctcatgggcatcgaggagacccaacatactgagatgtgagtgggagacatttctatcccagctgctgcttctgtggactgtgagtcctctcttcccgacatggaaattaccaagctaagtcctgggtgataggactgagggccggaaaaccagaaaatagcagcaagccaccaagtgatccagatggtggagatgagcgttttaaagtaggcagagccgggcatggtggcagcacctgtggtcccagctacccgggaggctgaggcaggaggattatttgagctggggaggtggaggctgcagtgagccgtgattgtgccaccgcatccggcctgggtaactgagcaagtctcaaaaaaaaaaaaaaaagccagaacaacactaatggttggttcttttgaaaagcgtaatacaaatttaatcctctagcattactgacaagaaaaaatagaggagaaacaaactgccaatatttggaaggaagaagagagtatcatagcagatcttgcaggtaacaaaataacaataaggtgatcattggagaaactttatgccaataaaattgaaagtttagataaaacggacaaaatcccaaaaaaacacaaattaccaaaaacaaatgaaatgatataaaaaatctgggctgggcgcggtggctcacatctgtaatcccagcattctgggaggccgaggcaggcggatc[136 bp omitted]gaggcaggagaatcacttgaacctgggaggcggaagctgcagtgagctgagatcgtgccactgtactccagactggcaacagagcaagactccatctcaaaaaaaaaaaaaaaatctgaataatcctctatctattaaagaaatgccacctgtaattaaatagccttaccacacacaaaaaagtctttcaggatcaagttagctttaatagtgaattaaaaggaagaaatcacattgatcttacaggaaatcttccagaaaattaaaaacagtcatttcccaactcggttttaggacagaataaccttgataaaagatctgacaaatacgacaaaggaaaatttcaggccaatcttcctcataaatatagatggaaaatcctagactaaatattagcaagtgcaatttggcaatacatgttaaacaatcatgactaaattcactttattccagcaatgcgacaatggtttaataggtaaaaacaaatatatggtattcccaccttattaacataaaagaaaacaagcacattatcatttcagtagatacagaaaaagaatatggtaagattttacagcttacattattttttttttgagacacggtctagctttgttgcccaggctggagtgcagtggtatgatcacggctcaccacagccctaaactcctaggctcaagtgatcctcccctctacagcctctgagtagctgggaccacaggcacgagacaccacacccagctaatttattaaattttttgtagagtttgggtctccctatgttgcccaggctggtctcaaattcctgggcccaagtgagcctcccgcctcagattcccaaagtgctggaattacagacataagccaccatgcccagccttgttcatgattaaaaaaaaaaaaaatctcagctagctaggagtagagagaacagcttaatataataaggaatagccaccaaaaacttacaaagaacaagctgtttaaggtaaaacacagttgtccctcagtatcctcaggggttgggtccaggacctccccgcagatagcaaaattccttgatgttcaagtccgtgatataaatagcataatgcttgcatttaacctatgaacagcctcctgcacactttaaatcatctctagattacttataatacaatgtaaatgctccttagttattgtactgttatatttttgtattgtttttattgttgtattgctatttttattgggattttaaaaagtatttttgaccagtttttggctgggtcctcagatgcagagtccagcgacacagagggctgagggtgtagaacatgttccctctgagatcacagatgagacgttcttgctatcaccacttgcatttcacattggactgaacgttctatccagtgcaaatcctagccaggcaagagaaaggtaataataggcaaaaggattgtgaagaaagaaagatgagcctcattttttatagatgtgattgtgtacctttgattgggagggtatatctgagaggcttgggatatgctggtgttggtgaaatataattaaaaacaaaatatcctccaaacccagagctcttctccacccaggtagaagagaaagaaaatagttttattaatgggtaagcattaaaccagaacatgatatgcgaagagactgcaaagacagaaaaaaaaaatttcacccttttatatagccaagcagatacaacttattacatacctgctctcaagataaacaacagctagtcctcaagttaaagaacttgacagctctatttgctgtacatggttcaccgtaaattcacttggttattgggatagccaactgtgtttgttaattggcttaatccaagggaaaaataaacttctagtatctttatcacaggaggtagatttgctacttggggtgaggtgcccaccaaagttaggctccatcccctcccaacaagaagctggggaagatgtttcgaggtccttgaaaacaccctcctgggtcataatgctggccgcaggcttacttagctttgaaaaagattagtgtaaacgttgaagagagagagacttgcaatggcaaaattttctaaagtaaatgctctaagcaaaggggacaaggagtaatcgcttcctgaattttcaacagggagaattcattttttttcgttttcgatttgcatttgcctgtacactggtaatgttttattttttgattggaaacctgtttagacagacaggtttacgtgtaaaaaaaaaatgagattttctgaatgtaatacttttaaaataaaaagacaagggaaaaatgttacacaggcgaaagaaacactcttgcacctcatgaggtttgacataagaaagcgacacggtcggatctggtgctagaaagatcctgctggcactcatgtgggagatggatgagaaagagaaaggatggcgtagtgggcagaggcagccatcaagagcagagcctgaagcctggggatgggggagaggtggtggttttgttaccagaaaggggtcccgatcaagacccccagagagggttcttgaatctcgtgcaagaaagaatttgaggcaagtccataaagtgaaagcaagtttattaagaaagtaaaggaataaaagactggctactccataggcagagcagcagcaaggactgctggactgagtctccttatagttatttcctgaatatatgataaacaaggggtggattatttatgagttttccagggaaggagtggagatttcctggagctgagggtgcctcccctttttaggccagtaggggaacttcctgaagttgccatgccatctgtgaactgtcatggtactggtgggcgtgtctcttagcctgctaatgcattataattagtatataatgagcagtgaggaccaccagaggtcacttgaatcgctatcttggtttcggtgggttttggcagcttctttaccgcaacctgttttatcagcagggtctttgcgacttgtatcttgtgccaacctcctattgtcatcctgtgactaagaatgccttaacctactgggaatgtagcccagtagggctcagcctcattttacccagcccctattcaagacggagtcactctggttcaaacccctctgacagtttggtgagaaatctgggcaagacagggtcagatttggtgatgtcttggatgtgaggtgggagagccaaaaggcattcctgactgtttgtctggagtatggtggtaaccaagaagggggaagctggcagtgatggtgggtgtggaccaaaatttcaattcaggaggcaggcagagatgtgagtttggagatcagaatggagagacagcagtgacaggaagctctaaggcaggaagggaaggccatcagcatcaatcatctccacggttctctccagttaaacccttctcaggcaccaccccatccaggaaaccactccccaagaggaagaacacgtggaacttcctgaaatgcgcctacatggtgatgacctacctcttcgtatcctacaacaaaggggactgggtaagaagaaggcagcacggaggggaggagtgtgaggagaggaaggaaagaggagggaagtgggggcacagaggaagcgaaggagggtgcctcagaggtgccaagcaggaagtggtgggagagcccttctgtaaaacactctcttcttcccactctcccacccgcctccatctctcatttcattcttccttcctctctccttcttccctcttttctccctccctccctccccttcctccttccctttcctcttccttttttcttccctcccttacttcctccttctctctcctccctccctattctttcctcctcccttcatccctccctttctcccttccttcctttcttcctctctccgtctgcttcctccctcccttcttccttcccatccttcttccctctctgcccttctttccttcctccctccctccctcttcttcctccccgttcctccctccctccccccttccttttcttcctcccccttttcttcctctccctcttcttcctctccctcttcctccctccctcctcctcccttccttttcttccccccctccctgttctttccttcctccttccctccttctctctccttccttctctttccttcttccctccctcccacctctagactgggataaaacttctcccttctgcactaacacagccccaggggctcctttgaaatactgtcactcattctgcctctctctctgccgctgtctcttgttctttctaagggacgttcataaggaccaagcctgttgctggttgctggggactctgatggttgagctaccttcaagaaggtcctaattctgtaagggaggcagacatccacagagagaaccagatcaccgagtggtagcacttcatgagcaggtgctagtgcaggaggcagtggcgcttatctcagcctaggggaagtgtgggctcatggaagcctttctgcaggaggtgacacctctgctgtgggttaaggacagaatggaattagccaattgaggaggggaagcaggggaagcattccagagaaacaccatgtgcgagactcagagaggtgaaaataaggcagggtgcaagaaactacaagccaggccgggcacggtggctcacgcttgtcatcgcagcactgtgggaggc[135 bp omitted]aggcaggagaatcacttgaacctgggaagcagaggttgcagtgagccaagatcacaccagcctgggtgacagagtgagactctgtctcaaaaaattaaagtaaatagaaaaaaaaagaaggaaaggaaggaaaggagggagggagggagggaggcaagacggaagggaaggagggatggaaggaaggacaagtcatccttcattcattgattcagtcagtcttcaaatattcacgtgtgtagaggacccatcctagatgctggggactcagagaagaacggaacccataaggtccttgagtccccagggctcccatgtttgggatagcaggaggactgcagagaaacaagcagccagctccaaaaaacatgaactaaatcagggtgatatcacagagtgagcagccatggccacgggcagccttccccgggcaggtaacgtctggacataagagatgagacagtggaaggatcttgccttcagagcagcttgggggcaaccactgcaagcaaagcaggcatgcacagcagaccctgaggcaggaacacactgagtaccttcgaggaaccaaaggaacatctatgtgacctgagaggggcaggggggtccaggtcatgtaaggttctcatagaccacgagaaggaagcttgtgttctaagctagtggacagccgccagcaagatcccttctgagttatcaaaggatccttctcaatgctgcctgtggagagtggatcggaatcagggcgagagtgggagcagacagactgagaggaggagacacactgagaggaggcccgaccagccagcgcaggggacctggcggtgctcatggagatgagagccgtgcagcagttctaaaggaactgcttatgcgctgggtgtgaggaataaggaaaatggagagaccagggagatgagcctgagacagtgacttcagttatgctagtggttctgaaacgggggtgacgttgccacccaggagacactcagcagtgtctggaccacaggattggttgtgacagctggaggagggagctcgactggcatccagtgggcagaggccagggaggccactcaacctgccatacggcccaggacaacacgccacgacaaaaataacccaggtcaaaacgtcaggaacctgaggctgagaaaccccagcttaggggattgtgctgcttatggggatgaggagaactggctggaagatggggaagaaggtgggagtggtgagaggcgggctgaatagagaagcaagaccagaagatgttacaaccagagggaaagagcagagggggaggacgggaaagaagcgagagggggatggggagaaagggaggtaaggaaggaattcactcgcctcaccccaactgtttctttctctgttcccagttcactttttcctcccaagtgttactgccactactgtaacttggaactggacatcaggtatgctatggcagggaagtgggcttttcccaccgctggggtggggttaggggaggttcatcccaactgcctggcatttgaggtaaggaacacaggtggatttggaagctgcaatcatagaaacccagaattccatgagaagtcccaagttcgtcacccttacttgcaagccactgcctgacaggggcaaggaaacacattgtaaatgacagggatgtgccgggcaggaggaactcctttataaattcactctataattttttcacaagtcttaggacttgtggcccaacacacacgacataaaattaaccattagtgacattcagtacactcaaaatattgtgtggccatcaccactaatctgtttccagaatcttctcatcatcctaaaagggaactctgtaccaagacatcgtctcttccccctgttcctggcaaccactagtctactctctgtctctgagaactcacctactctggtcatttcatacacatggaatcatacactacgtggccctttgcatctgggtttattcatttggcataatatttccaaggttcatcatggtataccttgtatcaggactgtattcgtttctgctggataacactccacggcatggacatagcacactttgtttatccatcatcaggtaaagtgcactgggttgctcccaccttttgactgttgtgagtcgtggtgctatgaacaagttatgttagaatatctgttttaaaatcttttggggtacaaactaggagtggaattgctaggtcatatgataattctgtgtttataacgacccactgatgcatcctggatgcagtagtgaacggggcagacaagattcctgagctcacaagaaaacaattagatgattacaggtgatacttagagctagaggaaaagctgaggatatgatgaaaaagagaactaaagaaccttgccctggatagttgggtgatgaaggaaagcctctttaggaaagtgacaatgaatcaaaggcctgtagaatgaggggttgtcagatacacagaaaacaagtgaaagagcctccaggtgaaggaactggcttgtacgaaggccctggggtggaaagtggcctagatgtgcctggagtcagaaagaaaaatgggggcaggagaagggggagggagtgggagggcactatgggaggagtgtgggtgacatgctcagcagaccacctcagacctggaagattagagcaagcattttagacccaaccttcagagccatgggaagccacggaaaggctgtcagtgagaaagagacacgtcccagtgacatgaagtgtagaggccagttaagaggctactcagtttccacgagatgacggtagcctggtcaaggctagggtccagggtacggagagaaagtacgaaagacagatgggaggtttctcttccctcgatagctgcaaagagggtccccctggcctctcccgcatcgccagagaaagtactaaggacagatgggagatttctcttcccttgatagctacaaagaggctcctccctggcctctcccacgtcgccagagaaagtactaaggacagatgggagacttctcttccctcggtatctgcaaagagggtcccccccggcctctcccctgttgccagagaaagtactaaggacagatgggagatttctcttcccttgatagctacaaagaggctcctccctggcttctcccacgtcgccagagaaagtactaaggacagatgggagatttctcttcccttgatagctacaaagaggctcctccctggcctctcccacgtcgccagagaaagtactaaggacagatgggagacttctcttccctcggtatctgcaaagagggtcccccccggcctctcccctgttgccagagaaagtactaaggacagatgggagatttctcttcccttgatagctacaaagaggctcctccctggcttctcccacgtcgccagagaaagtactaaggacagatgggagatttctcttcccttgatagctacaaagaggctcctccctggcctctcccacgtcgccagagaaagtactaaggacagatgggagacttctcttcccttgatagctacaaagaggctcctccctggcctctcccacgtcgccagagaaagtactaaggacagatgggagacttctcttccctcggtatctgcaaagagggtcccccccggcctctcccctgttgccagagaaagtactaaggacagatgggagatttctcttcccttgatagctacaaagaggctcctccctggcctctcccacgtcgccagagaaagtactaaggacagatgggagatttctcttcccttgatagctacaaagaggctcctccctggcctctcccacgtcgcctgcctttcatcctctccctggcatccccagtgccctttttacattaaaaaatgtcaactcgatcatacgatatacccccaccccctgctgcagtcctgcttaaatccaccagtggaaactcaccaactatgatgagtgtctttcaaactttaaaagaaagaaaatccaaaacacttttctactgaaatcttacatggaatcccaatatataaaaaattctaagttgcttttcattaccagaggtacttttcctaaggttaactgtgtgacatttacttattatgaagtgaggtgatgagatttgcaagcacagggtacagaaggcctctgctgtcttacgttactctcttttaccccgtatcttgcagtgtttccttttaattgttcatacggagaaaaatctgagcccacagagataagtcactgcaaatgcctaatagtttgccttgtgaagtgtacatgcccttcaggtaatacaattttttccccaaggtctgtatgtaaaacatgcaacaggttggtgtggctctccagtgaataaaaatttcagtccatgtgctatattttgggtacacacctattttaaaaaatagtttaatttttgaaatgaaaatcaaagcaaacctttgtggaattcctaaaagatcccaagttttcagggaacctggcaggaagcctctgccccattgatcaagttcaggtctctggcatggtacccaagggttctcaggctccaagctcctcctgcttctctaaacttttctccacttctcttgatccccccacccacattccatcccctgtccatattaaacctttttttttgagacagggtctcgctctgtcgccaggctggagcgcagtggcgcaatcttggctcactgcaacctccgcctcccgggttcaagcaattctcctgcctcagcctcccaagtagctgggactacaggcgagtgccaccacgcccagctaagttttgtacttttagtagagacggg[142 bp omitted]ggctggagaacagtggcccaatctcagctcactgcaacctctgcctcccaggttcaaacgattctcctgcctcagactcccaagtagctgggattacaggcatgcaccaccacacctggctaatttttgtatttttagtagagatgaagtttca[132 bp omitted]catcacattttttttcccgctccattatgccattgcacacattgattccttgatctctgtctacctagaaaagtcctcctcagtcctcaagattcacctaagcaatgctttggttcaggaaccaacagcaatccttcagattccactggggaggatgctgaaggaaatgaatggtgttgaacggtttctcaggctctcttcaaccatacattaaagcaccggtcaaaccagatagttattttcatataaaggtgtgctttcaacccattaggcaagaggttggcaaactttctctgtgaagggccaaatattacgtgttggcttttcaggtcatatggtctgttgcaactactctagtcaaagcaatcgtagagaatacactgatggctgtgactgtacccaacaactgatgaaaggataaacaaaacgtagtgcattcatacaatggattattattcagcccccaaaagaggaatggggtcctggcacgtgcaacaacacggctgaaccttgaaaacactgtgctgagtgaaagaagcagacacaaaagatcacacagtagatgatgccatgtatatgaaacagacagatctggcaaattcaaagagacagaaggccaattactagttgtcaggggctgaggggaggaaggaacaaggggagtgactgcttttaatggatttcttttttgggttgatgaaaatgttccactcttagaagtgacaattgcacaacatggcgaatgtaatgaaggccactaaattgtgccctttcaaaatggttaaaatggtgaattttatgttatgcattatgtttgcattttacctcaattacaaaaagaaactttattaaaagggatgcaggctgcagttggccctgcggaacacagtttgagggcccctgctcacatagactgtgagcccctgtgggagcaggaagtacccctgatccatccctggaactccagcacccagaagcaaaccttaaggttctcttcctgcaactctgagtgactccagcacaccaggctagggggtgcagcccagccaggcctgggcagtccctgctcctgcggggcgcgccctctagtgggaggtaggggtgcaacacaagctcaggcccggcgccgggacagtgaggaactggagggggcgctgcttcccactggctggtttctagaagagccctgctctgaggaggagacacttgccctggtgatggggcagagctagggtccataagatctgagggaagcgtgttccagctgctggaacagcccggtgggaatagggacaaacttggtggaacctagtgagtggggagaatgggctaagctggagggaggaggtgggcttgaggcaggtcacaaagagccctgtagaggtggatggagagggcaccaggcaaggagtatgagaatgcatgaagacgaaaatcaatgcacaaatacatttctctctcctttcttagggatgatccctgctgttctttctagtgagcctgctccatctcagcttagccttcacaaggcctccatctcccaggcattctaacctctgaagaaagctctctgtcccctggactgcctgtgtggagggtaatgaactgggtcctttaaggaatggcacctgggtgcccagaggcatggccagaaggtgtctgtgggggccatgccttagggggatgcacccagggcggctgagagagcaactgcaggagtttcccctaaaatctctcctccagatcgttctcgaactttccccactacttccataataaaatgtatacttgttgaaatggctgaaaaggctgggttattccattcgcccaacactgaaaactaacaggtatgctggtggattaccaagaatcaaacgctatcagttaactgtgcactttacaggtgaagacactacagctcagagagaccgatggctcgtccaacatcacactaagctacacagctgagatttgacccagttggactcattccaaagtccgtattcttttgtgtaaagatttggggctgcccccaccgtcctgaggaaatacagttgtgaggatatggctgttccaggaggaagccgtatccagctctccagcctgcatgtttcttgcctattctggaggaggttccttgtcctggttgaaagctttggctctggagacaggtttcttgggttcgaatcccagctccaccccttaatagatatgcaggcttggggaaggtattgtctcttaatgccttattttatcatctgtaaaatggggatagtaacagtagggtagaagttctcttatcatcatgatcagaaccatcactggttggttcatcaaataagttggttccaataggtaattaaaaatacttttaccattttgttttaaaacataaaattgtacaggcatttgctaatcttttgatataagaccagggggtttcgttgttgttgttgtataggtctatggacctacaatttccagtttgtcccttaaaagggcagcggagacacaggcatgcttgcaaagctatttaagcaaaatcctcactgcattaaaaaaaagaaaaagatcatccctatagccatcttgctcattccaacttgacatattttttgttgttgctcttattaacaatcggcctttatcacatctttcccactgaattactgttttgggtggaaacaattctttgctgatgcactcatattttcctcatttatgttaaatgtaattgcattacataattgaaataaaatccattagaatgaaaaggtttagaataaatgcaactcaactagctctgggtagtcacacaactgaaccaatagagaagaatgaaggcatattagaaagcactgcactagccaggggcattcagtgagcctgaagcatcagttggtatatttcatagacggatggaaaattcttttaccccagggatcattttaaagtggagtttaagaaacagtctactgagtttgcctcatagaggtaaagtttaaatgagataatatatatatatttttaagttccacgatacatgtgcaggctgtgcagttttgttacacaggtaaatgtgtgccatggtagtttgctgcccctatcaatccatcacctaggtattcagcccagcaggcattagctatttttccaatgctctccctccccacaatcccataccccgacaggccccagtgcgtgttgttcacccctatgtgttcacgtgttctaaataagataatatttctaaaacacactgcctggcacatagttctcaattaatgtattgttattatctagggcagtgttatccaataaaaatctgtgagccacacttatttcacacttcctactagcccagaagcccggtaaaatcaatttgaataatatgtacgatttaattcaatatatccaagatacatttcaacatgtagtcaataaaaaaaattattaatgagatcagttatatccttcattttgtatgaagtctttgaaatccattgtgtatttttcacttatggcacatctcaatttgaatgctaaaattgatctgcaattatattttctaacatttatagttaaagagtagatccacatatccaagttgttccaaacagggttaaaggttgtctgataactgaaccaagtatcaatttaaaatttttcattaaaattaaaaaaactttacaagtcagttcctgcccataatccaagtctagtcataagcaagcatcatacaattccaaatggagggacattttacagaacacctagtccgtacacctcaaaactgtcaaaatcattaaaaacaaggagagtcagacacactgctgcagatcagaggagggcaggaagacatggcaactaaatgtcatgtggtgtcccacatgtgaccccagcacaggaaaaggacgttagagaaaaaactggggaaatgtgaataaagtctggcgttaacagtactgtagcaatgttacggttctgacatatctactaggcttatataagatgttaacagtagtggcagtggggaaggggtacatgagaatgctctgtactgtatcattgcaacttttctgtaaatataaaattatcccaaaattaaaaatgtaaaataaaaaatattccactcttcagctgcacttatcttacgtgtttgtgtccccatgtcctcctctgttaaatggggatgtagactgcacctatttcatacagtcatcgtgggaattaaagatggtgtttccacagaaatcctgcaaccatagttcaggcattgtcagcacaccatgcttgttagcgccagttactgttactgctgctgctatgattatgattgtttatttgtaagtgcagaggtctgggctcccatctccagacattctgactgagttgatatggctgtgtttgcataacagctcataggaagctcttgtcttttcttacagcaactcatgtgcaaacagggctgatcctttaaaatgtaataaagaaactgctaaaagccacggaaaccacccagtaagttgatgacagacagatggaagatgtattagtctgttttcacgctgctgataaagacatatccaagactgggcaatttacaaaagaaaggtttaatggacttacagtttcacgtggctggggaggcctcacaatcatggcagaaggtcaaaggcacgtctcacatggcagcagacaagagaagagagcttgagcagggaacctcccctttataaaaaaccatcagatctcgtgagacttattcactatcacaagaacagcatgggaaagacctgcccccatgattcaattacctcccacggggtccctcccacatgtgggaattcaagatgagatttgggtggggacacagccaaaccatatcagaagagaatgccaatccctccgtaggtaagttaggcaaaaatgatgtattttattttggtggaacccagtagtaactaatttttaaactagctttataaattcttttatcattaggaggtttcatacgctaaccagatgattatatgtccaggtgcttgatgttagttttttgtaacttctcctggataccattaatggcctttgtacatttaattatcccttccctttgatgatgggagtgctcttaaatttgatgtaaaatgaagttaatgtgtcagatcatgtccagacattcatatcagatttcaatcatctggtgagagtttactgggtgaccaagttatgggaaggtatagaagagtgttcaggaaaacttttagggcagcagttctcagtaggctgacttcagcccccaggggacatttggcaatgtctggagacatttttggttgtcacgaccaggagctaggggctggagagaatttttcctggcatccagtgggtgaggtgagggaagatcctcaatatcctaccacgcacagggcagccccccacaacaaagcaatgtctgtccccagtgtcaataaccctggtattgagaaactcggtaaggtctgaggccattcagctgttgagctcactgctgtctccttggccactagcacttattcggctctcagtgaatgaatgaatgcacagcacgaacctgtaatcaaggaccaagcgaactgcgggaggcagggttgctcctgagagcaaacagtgacctagttaacctggcgacaggcgtgaaaggaagtctgggtttccaatcaaaaatcgggagggaaggaaaaaagagtgaatcaattcttgcgaaaagtctctgcgcacttactagaaagcacgcggccaggaatcatgcagggcgcctgcacgcatattattatttaaataaagctgtccctcagcacaaacagcccgcaaggtcacggaaactcctccagtcccatccccgggctcggtcctcccacgaatctccccctcctcccacgtccccgccccaggcgcatgcgccctccctctccccaacccaccccagtccggcctccgccagtgacgtcaccgcaagggcggaagggaagctaaagtcgttaccatggtgaccgcgacacactcagaaacgtctactagtgacggtcaagccacctacaaccggtcccaaagccgcaaacgagtcaggcatcgtggtaggacctggcgagtggggccggggagagcgggacgcctggatcgggaacttgtcgcattcacattggctgctaggaggcctcggcgaccacttccggatccggggcgggggtcgcaactcccagcccttgctcagagggctgaactagaattcccagaagcctctgcggccgccttcctgctccttcactcctgcttcccccacaaataacagtgagtgaaagcatctaacaagcgtttccaactcgccgaatcattactagtgcaggcattttattctaagctgctttttactaaaacgtgctcttgtcgctctgaacctttaggactacaatacccagaagtctctgggagtcgccgagccctgtagtttagggttgttttgcggccagcgagacgccggaagtctgggaataaggcgggaccagggaaaaagcaggattccgattggtgaagaggccacatggccttctttaaaggacgggatagagttgcacacgcgcattgaggcgtgtcttccctggttctgcgtccgtgaagcctagagattcccgagcctgggtcacccgggcggtgtcgcatgtcgtctgcggggaggttggggctgctcgcgcgaggcgctctgggtctcatttccgaggccgaaaatgctggctccaaagtggtgccctgggagatgagggcgactcgcagattccaccctattctctgaatgggcttcgagtctccatggtaacggcccctcccagttcccctgtgacttcatagctgcccacgggaggggagaaagctgatgtgaaggggctgtgggttctcagccaagctctgtctttgaggccacctaccctataccactcgtcccggaaagggtgagccggtgacctttcaccctctctgggcctcagtttccctttttgtgaaataatgtctggtacccctgctgtgctcccttactatttcagggccccgggcaagagacacactctgtgtctcagtttccgcataggtaaagtgaggatgatgttagaatttgatgttaaaatttaggtggtggttgtgagaattaagggaacctcagagcaatggccagcacacaatgacccttcaaatgtcagcggctttgatgatcaccattcttaccttttctttggagatttggacaagttaccgccccaccttcctccagggtctttgtgtattgatctgcaggttggatgtattggatgttacgaccactaaactttcttctgagcacacacgagcagtggtgttgttctctctgagaaatactacaggctttggtgttaagacactggaattccggaaacctgtccctgtcataccagttgctgtgtgacctccgtcaatcatggttctttactgagccctgagactccgcacgtgaaaatggatggggatgaacttccagtccaggcagtgccactgactttgcttggggacctggggcaagctctgtggcccagcattgcaccatctgtaacaacataaccaaggggtgcgcaattgagctttgaggttaatttcggtgctaaaatcccggtcagtagttccgtcatcttcacagacctcaccctacccaatgcccttattgtgctccacatcccaatcaacacttactgattccagatttgtaatttttgccattgtagtgagaagtaattaactattttatggttttttaaatttgaatttttgactatcaggattagcatattttttttttcttcgttaaagactagtcaagtgcattagtgaggaggggggaaagagtagaccaaggaatttggtctgtaactgactgtggacaatacattggtagaactcactacctttgagccagccagaatctttttattattcactggatattcaggttttgcctctgtaaattttctttcattgccatttttttcaaatagttcattcaatctttgttttcagatgtgctttccacaatcaggttacaaattctctgccactaatgatcattacaattcctcttctcagcctgtttattgtttggtctgtttatggtttctcaggcttcttatttatttatttagacagagtcatgctctgttttccaggctagagtgcagtggtgtgatcttggctcactgtagccttgacctcctgggcttaagcaatcctcccacctccgccacctgagtagctgggactacaggcgcatgccaccacctgcagctaatttctgtatattttgtagagatggggttttgccacattgcccaggctggtctcgaactcctgggctcaagcgatccagccgccttggcctccagagtgctgggattacaggtgtgagccaccatgcctggactaggcttctttaaacattgaatagtgttcctttctagatgaaggaggatcacatagcacttgggagcaaagatgcagccaagtaacccagtgctggagcccacgatggagaagatctcacggccactctggccttgccctgggtgctttagtaactcgggaggaaggccacccagacactgcaggacaccagcatgctgaaggtcaggaacttggcttcgttgaaagcatcaggcaggttccttgccagaaaggctacagcaagggaccctaaaaccaagaagcccaagtagcccaagacagagtagaaggcagtgacggagccctcattacactggataatgatgtagccaggcatgaactgagggtccttgtttacgaagggaggctctgtccccagccagattccacagagggtcacttgggtaaaggagcaaaggaagacaacagaatttgttttttggggacccatccactttcggatcctgctttctggccttatagcctggaaggccctgcagaaaacacagccactgtgaacacagctgcaaaggtggtctgtgagaggaggcaggtggcagggctggggcggccgatgaagagcgaggaagagagaaagcagagtgtgagggagacaaggagggtgtagctcagagtctggttgctggccttgactatgggagtgttttggtgccacacaaactccacaaggatcagaacagagaggacagagtagaacaaggctgtgcatgccagagtcaggcccaaagtttcatcataggccaggaaggtctcctatttgagaaggtatgttcccttttcttgtttggataatgatattcaggacaaagcctgcattgttttatatctgaaataaacaaaaagggtgtcactgtctccaaaacagagcactgcacgtttggtaagattccattgcccagagctctcaccaccacagcgccatttaggtggactgtttggctggtgtgtgtgtgtgtgtgagagttgtgtgtgtgagttgtgtgtgtgcgtgcacgcaagcatgcgtatatgtgttctgcatgtgttttaaaggaaaacataaatacttcaccagcttttttttttgaccattttaatcagttttattgattcatgcttccggttcttattcagttcaaaacaaggcacattaaatacatcctcttattgctttataaatgcacgtagctcattctctatatcaaaagtaataaataatggccataaaacaccaagacctttataaaaatgacaacccagccttgaacatagtatttaacagtccaatctagaacaataacccaacacggtacatcaaagtgccacatatgaaaacatgcagtgtgtgtagtcactctagtactgagcttgcactggctattctttaaaaacatactagggctttttcactccttaaaaaaggtggacatgatgcaaacattgcaagttatagcatcactgactttaatattacatttatgtgccaaaaatctttacagatacataagagaaaataaaatcaatgataacaccgtatatttaataaaagtgaaaatgagttttttgttgtgccaaagaggaagctacatattttgaaacagacaaagccaagccagaaactgaagcagaagagggatcacgcatttaatagcagaaatcctaatacactcagtataaattgattgaaagcaggaatattgcaaacagcatgatggatatgaggcagaccaccgtggctaaacaaataatccagcattatcattattgttatgactgtggtggggctatttaaaggagtatccaactctctagcacagatgggggttccttcacctgactccccttaaaggctcttgaaataaatcacttgataataaaaggcaatccctgcatacccaccccaaccccaacagaatcaactaatgtcaagtttatatgcaaatggaaaattttttcttttgttcttggaacgaatttcaaagaagctcattcccccctatttcttgtctccctttcttaaatcaggtaaggaagctgtacaggcttaattcagaacttatggctgggtgcagtggctcacgactgtaatcccagcactttgggaggctgaggtgggtggatcacgaggtcaggagtttgagaccagcctgaccaacatggtgaaaccccatctctactaaaaatacaaaaattagccagatgtggtggcgggtgcctgtaatcctcactacccggggggctgaagcaaaagaattgcttgaacctgggaggcagaggttgcagtgagccgagattgcaccaccgcactccagcctgggcgacagaccaaggctccatctcgggaaaaaaaaaaaaaaaaaaaaagaatttacacaaaatgctggggtgctttattcacagtaatggcttgaaatcagttcatttccaaacgagtctctgggattggtgaaggaccgtgtgttttagcatttagcagattttaagtaaaagcagatatgctcaaaagaagaaaagtgtgcttttctttgtccttaaaggaacttcattcatagcaaaatatgcacaaacaagacctgtttaacaaacacagatctgctcgggccagtcgcatcctaagcccggtccctcctgtaactatggtccactggaattgggactcttctgtcgaggttctcttctgcagttttcattagtataaagagccggcttccagacacccttcctttttgaatagcactcatcagctgcaaaaattcattgagttcaacctgtccatttttattcaaatcgacttcatttagaatttcatggagtgtattttcatccatttggacattgatactctctaatacacatggaacatcaacaatggtaataaagcctttctggtctgcatcagacttacaaaatctcttcttatacctgtcactgtctgaaggcagtaggctaatttcagagccatctgttaactgttctgatcaaagtttagtctgtttcataatatagaaacttcctggttgtttcaagttgttcctgtttcttataatcatctcaattctgttctctgcccattagttcaacaatcctgagtagggcttgctctgctgcccggacatttagaaaggccaggcgaggctgaggcaggcagatcacctgaggtcaggagtttgagaccagcctgaccaacatggagaaacccaatctctactaaaaatacaaaattagccaggcgtggtgatgtcctgaccaacatggagaaacctaatctctactaaaaatacaaaattagccagggtggagacccaatctctactaaaaatacaaaattagcctgtaactccaggtactcgggaggatgaggcaggagaatcgcttgaacccaggaggcggtgattgcagtgagccgagatcataccattgcactccagcctgggtgacaagagcgaaattctgtctcaaaaataataataataataataataagccaggcgagtacaacgtgaaatcatatccacggtggtgcaggaatactccttaatcccatagttcacctctgcttcaatatatggaaattctgacacaagacgtactccaacaataggccaccttttgctagtcacacttgccattgtggccacctcaaaagccttatcaccataggtggcagcaagatgctgtgccccctcgctttcaagtccataatcctggacaagcttcatgtagagtgtggggttccaatctttacccccttgaaggaaaagcccagctgttctacttggtcctgctttcaaattgtgggttttgatagcagcatttagggtatcttcgccacagaccggtaagttgtccactttccacctgctgtagtaataagacttctctcactgacatggacaacatgatttcaggagatagactgagtatctgcagatttgggatctgtaacaaggggacggatactgctccacgctgctaggatgtcgcccctcttctcacctcaacatcacagctcaggtaattacgtgcttcattcaaaatgaagttaatatcttcttctgaaggacttggatggtgtgtaatatcagttggggtatcagtagtgccagcaatcatcatcttttgccagggtaagaagaaaataactcgcccatcactggtcaagaagtcccatgccctctgggctgtaataaccaggcatcacaatgtggacaccagcagttggctggcagatagctgcagcatccttatcatctattttgcacacagagtctgtgaaatgtccaacggcattgataacacacttggctttcatgtcaaattcctgccctgtgaggacatccttgcaccatgcaccactcacacgcactttcgctgtctgtctgggtgtctgtcttcttaagcaagctcactacctccctgtcattgactgtggcatccccatatctggcagcagtcagcacaatggcaaggttcatccatgcatcgttatgtcgtccatcatagtagacaattcctcctaccagtttgtccttctggagcattgggaaatgttcaagggctcttgatttgctgaggacataactgcttttcaggcaattacttcctgcaaccaaatcatacagcttgattcctacccagtagtaaggtaactgccaccacttgtaaactggaagcatgataggcaatggagctgataaatggggagaaatttctggcaggttggcacgctcatcaagggcttctgttaccatccggtactgctcaatatccaacttcatcatggccttctgaagatatctcacaccaccatggatcaaattagtgcttctgctgctggtccctggtaagtaatcatctctttctacaaggctgtttttagtcctctggtgacggcatctagtgcacagccacttcctctttcttctcctcccataacaaggatatcaaattcagatatatttttgcaaagtcagtagctgagcgtctctggaaggaggctccctgttaacaggttctgaaatgcagtctgctgcttcaacatagaccaggctcatttgtttccttctgtaataagcaaactgagaaagtcctaaaacagttgcaagagcacctccttcaacaagaattgtccctttcactgccttttgaaaggccatttcttagcctgaggacttctcattgtctgccgccagatctggcttcccctattccacacctctcagccggcaggcttccctaggcctacaaatttgtccaggaggcgggcgaccccgcaaccccaccatcagagctcagagccctcgcctggctttacacttcaccagcttttccagtaatactgggggcaaaatatcctggaaaaacttccactacagtgtctttaataattgtggatcttacctctctgttcatctctgtctctatctcatgtaaacgcgttccctccctgcccaatctatctctcgccatcttgatatctatctatagatacagacatgtagtcgcctctcagtatgtctgtaggggattagttctaggatcatctcaggcaccaaaatctcaggctgctcaagtccactgcataaaatgaagtactatttgcatataacctagcacttactcctgtatactttaaatcatctctagattacatataatacctaatacaatgtaaatgctatgtaaat[170 bp omitted]gcctcccaagtagctgggattacaggtgcccgccaccacgcccggctaattttttatattttcagtagagacggggtt[145 bp omitted]tgtcactcagagtgcgctggcacaatcacagctcactgcagcctcaacctcccaggctcaagtgatcctcccacctcagcctcctgagtagctgggactaggtgcatagtttattttttgtagagacaaggtctcaccatgttgcccaggctgatctcaaactcctggactcaagtgatccttctgccttggcctgccaaagtgctgggattacaggtgtgagctactgtgcctggcaaaaaaatatgtttgatcccaggtttgttgaatttatggatgcagaaccctgaggcagaacttttttttttttttttttttgagacagcgtttcactcttattgcccaggctggagtacaatggtatgatctcggctcactgcaacctccgcctcccgggttcaagcgattctcctgcctcagcctcccaagtagctgggagtacaggcatgcgccaccacagcctgctaattttgtatttttagtagagatggggtttctccatgttggtcaggctggtctcaaactcctgacctcaggtgatccacccgcctcagcctcccaaagtgctgggattacagtcatgagccaccatgcctggccggcagaacttttttttttatagatacataatagttatatatattgtgggatcagtggtattttgatgcatgcatacaatgtctaatgataaaccaggacaattgggactccatcaccccaaacctgcaccctttctttatgttggaaacatttcaattcctcccctccagcaactttaaatcatacaacaaattattgttaactatagttgccctgctgtactactgaacagtagatcttattcattctatccaactgtatttttgtgcccacaaaacaacctctctcctttccccctctattcatagcctccggtaaccaccaatcaactctctaattccatgagatccatgtttttagctcccacatatgagtgagaagatggaatatttgtccatctattcctggcttatttcacttaacataatgtcctccaattctatccatgttgcagcaaataacattttattcttttttatggctgaataatattccattgtgtatatgtatcatattttgttcttcagttggtcaagaggtatatgaaactctgttcaacatcagcacatcagggaaatgcaaatcaaaaccacaatgagaaattatctcactccagttaaaatggcttttatcagaaagccaaaaaataatggatgctggtgaggatgcagagtaaggggaaccctcgtacaatgttggtgggaaagtaaattagtacagccactatggaaaactgtggtggttcatcaaacaactaaaaatagaatccccatgtgactggcattcccactgctgtgtacatgttcaaaaaaaaaaaaaaaaaaggaagttagtaggtcaaaaagatatctgccctcccacatttactgacacaaatttctgagggcctgtggaggaaaagttaaatattaagtttgaattcaattgaacatggccacaaacaatggtcaccaagtcctggaacaggttgtgtgagccccttgaggcattcacccagcactgttttggagaactgtctatttcaatctattcctatacattagttattgaaaaacaatagacaaccacaaaaaaaagttgacctttttgtgttccttgagcccagtcgtgaagggcccttgtgactgggcctcatgtcaaacaactccttacaaaaagaactagggtcccagactgcgttgaagcttcatgagacctctcattttctgtgcatggacgagtgtctgactctggagcctaggctgttgcttcccagcctggtggtgaatcctccatagtctggtgagtgtaaatagatgtatatcttttcccttcttccctccccattgcaatttgcttattatatccatttgcttattatataatttgcttattctatctacattgccatttacgtgggataaaggttgtttacccttaaaggtattgtgtgtgtgtcttttcttctcccctcacacgtttcccacacagaatggggcccctccccagaaactgtcttccttcctaatgtcccgctttatgggagctcagttcaagatgagatttgggtggggacacagccaaaccatatcaatgactgctttgtttggcccagattccagttgtatctactgggagaggaattatcccctgaaagagaacagggaggtcatggggcttagcttgctaggttcccttcttgtgtgaatttcactcttgcatgaccttttatccctgcctgaaaactgttgccagatagaatgcatccaggtttgttgttttctgtatcaggaagtccagtctagcaccagtcactctgtcatcaccagaagtagacacttaaaaaaaaaaatagcgtttgaaggggttaaggagggagaattcattagattagtgaggcagatatactggttatctgttgttgttgttgttgttgctgttttcaggatttcagggcctagattttatgacaagaaatatttcaagaggattagagtgtggtgttaaagaattaagaagacaatatatattgagtgccttttgccagctttgagttttgattaacaaaaaattacatatatttagagtgtacaatgggatgtcttgatgtatgtatatattgtggtttttttttttgagatggagtcttgctctgttgcccaggctggagtgcagtggtgtgatctccgctcactgcaagctccacctcccgggttcacgccattctcctgcctcagc[176 bp omitted]gcctggcctgatatacgtatatattgtaaaatgtctaaaacaagctaataaatatatccacatctcacagttaccattgtgtgtgtgtgtgtgtgtgtgtgtgtgtgtggtgagaacatttgagataactcttgaaaaatttcaagtacacattaggattctctatgttcaccatgctatacattaggtctctaacagtatttcatcttatagctgaaagtttctgcccttagacaagcatctccccaatcccccaaccctccacccctggtaactgccattctactctctgttactactctctgagtttgactttttaatattccacatataaatgggaatcacgcagtatgtggctctctgtgcgtggcttatttcacttcccatagtgtaccgctgggtgcctttcagtactgggcgattaactgcaaatgacacccccacccacacatgctctcacgtaaatgtgcggcatctctccctccacttcactaatggtacaaatcccactagatctcgagtctcctctgctttgatttccatcatgggccctaatatgcaacatattgatgcgctgctcataatcaatcatgccaagtcttcttcatgcctgtggcttcctcttcaacacataaagaaaccagccttgagcagaacatagcagctgaaagacactccttacactttgctctgtacccatcattcactcatccagcaaacattcactcagtgctatatgctgacccacctacaatgcccttcacgagttgaggttgtgcttaacctcaaaatagtcatgtgacacttacatgaatatagaaaagctacagtgattttttttttttgttagagatagagtctaatttcaggtgtccattaggatttactacattcgtcatgctatatatacattaggtctctaatgtcacccaggctggagtgtagtgacacgatcatggctcactccagcctcaaactcctgggctcaagcaatactcctgcctcagcctcccaagtagctaggactaaaggtgcatcccaccgcacctggctatgttttttattctttatagaaatggggtcttgctatatttctcaggctggtctcgaactcctggcctcaagcaattctcccatctcacctcccaaagtgggggattacaagtgtgagccatagcacctggccaactgcaatgattttaattataaatatatatatttattaataatacatttactatgtttatatattatgttttataatgtacatgttaaatatgtataccatataagtcatacacatattgaatataaatatgcacattatattaaatgacattaaatatatacaaatatcttatatgtatgatatataattttacatcccaaaatgcatattttacaatataagtgcatgcatatcttatactatctaggtataaatgtattttatgtattctatacaaatactatacaatacataaatttatgtatatattcaattttacacatctactaatatatgtaatctattttgtttttacatgtgtatttacatacacatgcgatacatatgcactgtagttcatgtattacatatgcatagttgtgtgttatatgtagtattacataagtatccatacgtgtatatatttcccatgtaaatgaatatgtgtagtatagataattcatatatatcaaaatatgatagtatacatgatatattcacattagtacatattttgatacatatacattataaaccttacatacatttatattatgaagtatatccacatagttagaagtagcttaataataaactcaacatttatggtagtggtcatgtatgggagtagcacagtgaagggagaaagagagaagcatggatggacaggagaagtgatcagtgtttactccttaggtggatggggatgtttttggtagttcatcattttactatgttttataactgacatgtatgttgcaagttgttttttcaacatattgaatacttccaaagatacaattataaagaaaaatgctgtcacagaatgcaaacttcctgttttaaaaattttactattttattataaaataattttagttttatgacattaaaaaaacatatttgtggccaggcgcagtggctcatgcctgtgatcccagcactttgggaggcctaggcaggtggatcacgaagtcaggagtttgagaccagcctgaccaacatggtgaaaccccatctctactaaatacaaaaattagctgggcatggtggtgcgcacctgtaatcccagctacttaggaggcttaggcaggagaatcacttgaaccgaggattgcagtgagctgaaatcacaccattgcactccagcctgggctacagagcatgactctgactcaaaaaaaaaaaattgttccaaaaaatgggtaaaatatggtaaagaagataatcaca[133 bp omitted]actaaaaatacaaaaaaaaaaaattagctgggcatggtggcgggcatctgtagtcccagctgctggggaggctgagg[139 bp omitted]acagaaattttaaaaataatttgaccttggctgggcatggtggctcatacctgtaatcccagcatttagggaggccaaggtggatggatcagttgaggccagaagtatgagaccaacctggctaacatggcgaaaccccgcctctactaaaaatacaaaaattagctgggcgtggtgccatatgcctgtaaacacagctacttaagaggctgaggcacgagaatcagttgaatctgggaggcagaagttgcagtgagccgagatcgtgtcactgtactccagcctgggtgacagagccaggctctgtctcagaaaacaaaaacaaaaacaaacaaacaaacaaaagttgaactaaataaaaatgaagttacaacttaccagatttgtaggatgaagcaaaagaaatgctaagagggaaataggagagttatagtattaagtatatcagtaaagaagataattctatattcaatagtctatgtttataccttaggaaactagaaaaagtactgtattctgtactctaatcccaaagcaagcagaagaaataataataataattggagtagaaattattgaaattgaaaatagaaaaatagagaaagtcaacatctaaatattccttgaaatagtcaatacaatttaaaaaacataaaaaaaaagtttttcatgataatttactttctcacatcttggtaggtcaaatatcttattttgttctttgtgtatcaccattgtaatctgggtagtttatttatcccaacaatgaatgtttttatttttaaaaaatttttatttcaaaactaatttccactttaggttcatggaatacatgagtaggtgtgttacttaggtatgttgcatgatgctgaggtttgatgattgatcctgtcactcagatagaaagcacagtacccaatagtttttcagcccttgcctcttgtcttgcttctcccctctggtactccccagtgtctactgttcccatctttatgtccatgtgtgctcagtgtttaacttccacttataagtgagaacatgcagtgtttggttttctgttcctgtgttaattcacttaggataatggtttctacctgcatcgatgtcactgcaaagcacaagattttgttccgttttatgactgcatagtattccatggtgtatatgtaccacattttctttatccaatccactaataatgggcagctatgttgatttcacatctttgcttttgtgaatagcgctgcaatgaacatatgggtgcatgtgtctttttggtacaaaaatttattttcttttggatataaaaccagtaatgaattgctgggtcaaaggatagttctgttttaagttctttgaaaaatctccaaactgcttttcatagtggctgaactaatttacattcccaccacagtgtataagcattcccttttctcagtagccttgccagcatctcttgttttttttactttttaataatagtcattttgactggtgtaagatggcatctcattattgtggttttgactttcatttctctgacgactagtaaagttaagcatttattcatgtttgttggctgcttgttttcttttgacaagtgtctgtttacatcttttgcctacttttaagggggttactttatttttgcttgtttagttgtttactttttatgttgattctgaatattagaccttttttgatgcagtttttgaatattttctcccattctataggtggtctgttactctgttattagtttcgtttgctgtgtaattagatccaatttgtcatttttttgttgcaatagcttttgagaacttagtaataaatttttttccaaagccaatcttcagaatggtgtttcctaggttttcttctagacatctcttagattgaggtcttacatttaaatctttaattcttcttgagttaatttttgtatatggtgaaatgtaggggtccagttgcattcttctgcatatgcctagccagcaatctcagcaccatttattaaataggtagttcttcaccattgtttttctgttgttgccattgtctaaggtcagatggctgtaggtgtgtggcttaattctgggttctgttttttgttccattgatctatgtctgtttttgcatgctgttttgcttatcgtagtcttgtggtacagtttgaagtcaagtaatgtgatgcttccagctttgtttttgttgttgtttagaattgctttgacaattcaggctattctttggttttagatgaactttagagtagtttttttctagttctgtgaaaaaagatgttagtagcttgataggattggcgttgaatatgtaattgctttgagcagtatggccattttaacaatattgattcttacaattaatgaacatggaatgcttttccattaatttttgtcatctattatttttttcagcagtgttctgtagttcccctggtagagatgtttcaccttcttggttatatatagtctaggctttttttttttctttcagctattgtaaatggaattgcattctttttttttttttttttttttttttttgagacggagtctcgctctgtcacccaggctggagtgtaatggtgtgatctcggctcactgcaacctctgcctcctgggttcaagcaattctcccgcttcagcttcctgagtagctgacattacaggcacccgccatcatgcccggctaatttttgtattttggtagagat[139 bp omitted]cccttaatttcattgtttacctaaaagtcattcaggagcaagttatttaatttccatgttattgtgtggttttgagagatcttggtattgatttctatttttattgcactgtggtccaagggtatggctgccatgatttttattttttttaattgattgaaacttgctttaggctgagcttgttgtccatgtgttccatgtgcagatgagaagaatgtgcactctgtagttgtggcttcagtgttctgtaaatgtctattagggccaattggtcaagtgtcagatttaagtccaggtttctttgttagttttctgctctgatgatccgtctaatgctgtcagtggggtgttgaagtcccctactattattgtgtggatgagtcttttcatagatctagaactacggctttatgaagctgggtactctaatgtggggtacgtatgtatttagatagttaagtcttcttattaaattgaggtctttatcattatgaaatgtttttcttcatacttttttatttttgttgttttaaagtctgttttgtctgatctaagaatatctacccctgctcttttttgttttccatttgtatgattttcttccaaccttttactttgagccgtatgggtgttgtcacatgtgagatggatctcttgataacagcagacaaatgagtctttctttttaaaatcaaacttgccactctacgccttttgagtaaggcatttaggccatttatattctaggttaatagtgatatgtgaggttttcatcctttcatgaagttgttgcctagttgctttgtaggtttttattgggtggttgctttataggatctgaggaccatatacttaagtgtatttttatggtagcaggtattgttcctttgtttccatgtctagaattcccttaaggatttcttgtaaggctggtctagtggtaacaaatacccttattgcttgcttgtctgtaaaatattttatttcttctttgcttttgaagcctagtttggtgtgacataaaattctttgttggaatttcttttctttcagaatgctgaaaataggccttcaatcccttccagcttgcaaggtttctgctgagaagtctgctgttggtctgatggagttccctttgtgcataatctaacatttttctgtagctgtctttaagattttttttttttagtattgatggtagacagtgtggtgactatgtcttggtgatgtctgtttcgtatagtatctcccaggtgttctctggatttcttctatctggatgtctacctctccagcaagattagggagattttcttaaattattctctcaaatatgttttccaggtcatttaccttttctccttctctcagaaatgtcattaattcataagtttggtcactttatataatcccatctttctcaaagactttattttttttttaattcttttttttgtttgagtttcttcaaaagaccagacttcaattccgaaattcgttcttctgcttgctccagtctattgataaagcttttaattgtattttgaaattccttaattgagcttttcaataccagaagctctgactgatttctttttgacatgtttatctcttccttcatttactagattgctgtagaaatatttgtgttgattttgaaccttgccttgggtgttgctgagcttccttgcaatgcatgctttgaattttttgagagcttctcttagtaaacaataataaagtatatacctagtgacattggccacagccatctcttattcatgcatgccatctgctggtagtatgccaaactgcacaatagctcaatataaagccagacatgagaagagtccatagggctataaaagcaaagccaaaagatggtagcaaacatactgtatgctcacaccttctagggagacaggggaaaggaaaaagaaaaatatatatatatatataagaatcttgtctgcatgaaaataattacaaaaattaggaatgccaacatctccagatgagaagaagccattgtaagaattctggcatcatgaaaaatctgaatgttgtgacaccactgaaagattacactagctcttcagcaatgatccctaaccaaaatggaaaataagagattacagatttaaaaattcaaagcatgcattccaagatggacaagtctggaatgggcaggcccatgtacaggcttcctgatagcagacacaagcaccagtgtcaaccatgtacccagaggtgtgactagccatggagatcagataggaaacctccttggctccaagttctctgcatagagtggggtgttctagatgcctggaggtctgcctgggcttggactatagaccaccccactgcaccacaatctctgcaaagaaagggtggggtggctcacagactgcctattttatcacatctctaccatttggtgatgatctgatcttgcacaaattattttattattatttttaaattttttattttgttcacttttccaacatgatgtatcagttacattgacataaccatttatttttattttttatttctgtgggtacatagtaggtgtatatgtttatgggttacatgaaatattttgatataagcatgcaatgcataataatcacatcaggataaatggggtatccatcaccccaagaatttattttttgtgttacaaacacaaatatagagctcccagaggaatgggcagaattccatctttgctatttctcagccttcactggtgatacctccaggtactggaaaatctgagatgactagggactggagaggactcctagcaaaccacagcagccctatagaaaagtggccaaattattaaaagaaaaaaatactcatccaaaggtcagcaacttcaaatattaaaggtaggtaagcccacaaagatgagaaaaaaatcagcacaagaatggtgaaaacacaaaaagtcagagtgccctcttttctccaaatgaccacatcacctctccagcaagggtttgaaactgggctgagatggctgaaatgacagaagtagacttcagaatacggataaaaacaaacttcactgagctaaagtatcatgttttaacccaatgcaaggaagctaaaaagtcatgataaagcattgcatgagctgacagacaaaatagccagtgtagagaagaatgtaaccagcctgacagaactgaaaaacacaataaaagaatgttaaaatgcaatcacaagtattaatagcagaatagaccaagcagaggaaagaatctcagagcttgaagactgcctttctgaaataagataggtagacaaggatagaaaaaaaaaaaagaatgaaaaggaataaccaaacctccaagaaatatgggattgtgtaaagagaacaaatctatgtctggtgtacccaaaagagatggggataatggaaccaatttggaaaacatattttaggatatcatccatgataactcccccaacctagctagccaggccaacatttccatttgcttggtagatcttcctccatccctttattttgagcctatgtgtgtctctgcatgtgagatgagtttcctgaatacagcacactaatgggtcttgactctttatccaatttgccagtctgtgtcttttaattggagcatttagcccatttacatttaagattaatattgttatgtgtgaatttgatcctgtcattatgatgttagctggttattttgctcattagttgatgcagtttcttcctagccttgatggtctttacaatttggcttgtttttgcagtggctgctaccagttgttcctttccatgtttagtgcttccttcaggagctcttttagggcaggcctggtggtgacaaaatctctcagcatttgcttgtctgtaaagtattttatttctctttcacttatgaagcttagtttggctggatatgaaattctgggttgaaaattcttttctttaagaatgttgaatattggcccccactctcttctggcttgtagagtttctgccgagagatcgctgttagtctgatgggcttccctttgtgggtaacccgacctttctctctggctgcccttaacattttttccttcatttcaactttggtgaatctgacaattatgtgtcttggagttgctcttctcaaggagtatctttgtggcattctctgtatttcctgaatttgaatgttggcctgccttgctagattggggaagttctcctggataatatcctgcagagtgttttccaacttggttccattctccccgtcactttcaggtacaccaatcagacgtagatttggtcttttcagatagtcccatatttcttggaggctttgttcatttctttttactcttttttctctgaacttctcttctcgcttcatttcattaatttcatcttccattgctgatactctttcttccagttgatcgcatcagctactgaggcttgtgcattcgtcacgtagttctcatgccgtggttttcagctccatcaggtcctttaaggacttctctgcattggttattctagatagccattcgtctaattttttttcaaagcttttaacttctttgccattggttcgaacttcctcctttagcttggagtagtttgatcttctgaagccttcttctctcaactcgtcaaagtcattctccatccagctttgttccgttgctggtgaggagctgcattcctttggaggaggagaggtgctctgatttttagagtttctagtttttctgctctgttttttccccatctttgtggttttatctacctttggtctttgatgatggtgacgtacagatgggtttttggtgtggatgtcctttctgtttgttagttttccttctaacagtcaggaccctcagctgcaggtctgtggagtttgctggtggtccactccagaccctgtttgcctgggtatcagcagcagtggctgcagaacagcggatattggtgaaccgcaaatgctgctgcctgatcattcctctggaagttttgtctcagaggagtacccagccgtgtgaggtgtcagtctgcccctactggggggtgcctcccagttaggctactcgggggtcagggacccacttgaggaggcagtctgcctgttctcagatctcaagctgcatgctgggagaaccactactctcttcaaagctgtcagacagggacatttaagtctgcagatgttactgctgccttttgtttgtctgtgccctgcccccacaggtggagcctacagaggcaggcaggcctcctcgagctgtggtgggctccacccagttcgagcttcccggccactttatttacctactcaagccccggcaatggcaggcgcccctcccccagcctcactgctgccttgcagtttgatctcagactgctgtgctagcaatgagcgaggctctgtgggtgtaggaccctccaagccatgtgtgggatataatctcctggtgtgccgtttgttaagcccattggaaaagtgcagtattagggtgggagtgacccgattttccagatgccatctgttacccctttctttgactaggaaagggaattccctgaccccttgtgcttcccaggtgaggcgatgcctcgccctgcttcagctcatgcacagtgcactgcaccgcacccactgtcctgcacccactgtccggcactccccagtgagatgaacccagtacctcagttggaaatgcagaagtcacctgtcttctgcgtcactcatgctgggagctgtagactggagctgttcctattcagccatcttggctccacccgccctgtactttcatttataacttgcttgttttacttaacaatgcctcctggaaattattccttaacaggtgtgaagtttatctagttctgtgtgtgtgcgtgtgcaggtacatgttgctttacatcctggtcaatatttagtgattacagatttgtaagtttttcttttattctgcaaagtaatatgctatttcgtggctttttaatttgcatttttgattactagttaggcttagcatcttcttttttaaaactgaagactagtgaaagttgaatcctggaagaggggagagtataacaagataaatctgttactgtgaaaaattaattgtgacaactcaataccttccaatgagcccagaatcttcttattcactggatattcaggtttgcttctgtaagtaacttgccaatatctcattttttttttgaaacaagttgtttaatatttattgatttttcaggagcactttacacaattagcttacaaattctctaccactaataagcattatagtccctcctcttaatctaaatatagtatagtccttctgtttatggtttctcagcttcttctttaggcattgaagactgttcctttctgggtgaaggagaatcacgtagcaattgggagcaagatgcatccatgtaacccagtactggaggtcaagatggagacaatctccacagccaccatggcctttccctgagtgctactataactcaggaggaaagccacccagatactgcagaacaccaacatgctgaaggtgagacatttggtttcattgaagatgtcaggcgggttactttccaggaagactacagcaaaggtccccagaaccaagaagcccaaatagctcaagacacagtagaaaacagtgatagagcccccattacactggatgatgattataccaggactatgggtctttgtctagggaggaaggagatgtttccaactagattccagagatggtcacttggatgagggggcaaaggtgacaacagaatgagattttagggtacccaacaggaccttgggtcctggctggccttgtagctttcccatcctgctagctggccttgtagcttggaaggccatgaccacagtgaaagttttggctgaagcagaagacacagccactgtgaactgaactgaaaaggtggcctgttcccagggttcaaagcatatatggaaggagaaagcttgacagtgacgtaatgtatttggagtgcaaaaatgcctgcagggaattcattctaaatggggagaaatacagaacaggccttaggaacaatgtgacctgggcattgtcatcttttcattgtaactaattacagactgcactggatttgtgagacatatgacagcaaaccttttctgtaaagggtaataaatatttacagtttgcaaaccagaaggtgtctgtggcaactattcaagtcttctcttgcagattgaaagccactgtaagcaatatgcaaaggagcagttgtagccgtatttagcaatatgcaaaggagcagctgtagccatatttagcaatatgcgaaggagcggctgtagccgcatttagcaatatgtgaaggagcggctgtagccgcatttagcaatatgtgaaggagcggctgtagccgcatttagcaatatgtgaaggagcggctgtagccgcatttagcaatatgtgaaggagcggctgtagccgcatttagcaatatgtgaaggagcggctgtagccgcatttagcaatatgtgaaggagcggctgtagccgcatttagcaatatgtgaaggagcggctgtagccgcatttagcaatatgtgaaggagcggctgtagccgcatttagcaatatgtgaaggagcggctgtagccgcatttagcaatatgtgaaggagcggctgtagccgcatttagcaatatgtgaaggagcggctgtagccgcatttagcaatatgtgaaggagcggctgtagccgcatttagcaatatgtgaaggagcggctgtagccgcatttagcaatatgtgaaggagcggttgtagccgcatttagcaatatgtgaaggagcggttgtagccgcatttagcaatatgtgaaggagcggttgtagccgtatttagcaatatgtaaaggaggaattgcagccatatttagcctgtgggccaagatttgcctgcccttgctctagatgacttagagaactcaacacctgcccacactgacccttccaatctgttcctggggattgtctgatactactgtcttggggaaagtctgagcatttttcccctcctccatccaaacccaaaatggacagagaaaactcactttgtgcaaaatggaaatccaaatggaaattggattccatttggatttccattttgctatggagactcatgcaacctgttctgtggccaactggacctagaaggatggtgttctctcagaatttgcaggataaagttacccaaagagtaaacatgagttgaatgtcaactttcagaaggaatcatttgaaagcccccctatcatctttctgtcagcaaaatgtctctcaaggcagtgcctgcattcaaagtagcagtggagccagcagggcagctctcactgcagacggaatgagaaaactggaggaagcagagttctaaggttagattgtcggatctccaggagaacgaagttcaaaaccacttttccttttcacaattctcttgattcttctcttagtatgagtcagggtagcaggtcacatcaatgtcatgaaaggaatactaatgataataatttaggatatttttggctacagctagagaaatctcaaacaaacaagcttaatcaggaaagcttttgacacatagttggaaatggaggtacttatgtgtttctgaaatcctgtttttattggcttctcattggctttttcatgatggcaaaattatacttagctgttagagccttcatatccatgaactacaatttctgtggaataagaaggagatatactggaactgaagcttttggtaacctcgaattttcattttggcaggcaaaccaaagagaagaaagactttgtgcttgagagttgaaaatgagaccaccttgccatgtcaattcaggtctcttaaagtcttcccttgcaggagaagagggaagtgaaaagatcttcttgtgaacagggtctggtgtggacctccagcaaactccaacagattaattcattgacagaatgggattgtcttgtgaaagggaaatatcttggatcccttcaagctgggaacccctcagggcaaatctgcctacttctgtcaattcatcaatctcattctccgtccagttttgtgcccttgctggagaggagttgccatcatttgtcatacacaagtatcaatagccaaattgatcacgcaaaagaaacgatatcagagattgaagatcaacttactaaaataaggcatgaagaaaagattagagaaaaaagaatgaaaaggaactaacaaagcctccaagaaatatgagactatgtgaaaagaccgaactacagttgattggtgtacctgaaagtgacagggagaatggaaccaagttggaaaacacatttcaggatattatccaggagaacttccccaacctagcaagacaggccaacattcaaattcaggtaatacagagaacaccactaagatactcctcgagaagagcaaccccaagacaaataattgtcagattctccaaggttgaaatatatacaatatattcaatataagctctcagtatttaaaatttagtagggcttggtgtcatttttagacccaggagtcaaggccctgtaactcaatgtcacaaggactttaaaagcacatacaggaagataacaaatgtaataaccttcattaaaaatttttttaacctcagttttttctaagcaataaaacataaaatcttctaggcaggttaccaaaaggcaaaaaaaaaaaaaaaaaaaaaaaaacccttctgcagtgcacagaatattatgttcaaaggaaacatttcctttagacctttgagaaaacactgttagcatcaggcaacaacaacaacaaaaaactggaacccaaggaaaacaaacttatatgacctgaaaatgagttgaaggagagtgttactattttgtgccttttaaaaagggagagaaaaccaaaacccgtgagatgcaataaaagttgaattttgggttaaaaattaaaaaataaaatatcttataatttattgagtaaatcaaccccttaagaaaatttcattgttctaaccaattctttagtgtataagtgttttcttacatcaaacccaatctacagaaacactactatcatttctctttatagacaacttaatcacataaaagtttttgatttgcttatttaataatcttcttatagtgacttatacagaccattcatgacatgcttggattttctggtttgttctaaatatcactttttcttaaacaactagtcattttattctaggactaaatttaccatacaagattctttctcatataaaattatttctctttaagctgtcttacaaaaaaaaaacctctttcttttttttgggggatgcccttaaataaatattttattttgtttatatcattgtagatactagtacccttagtttagtaaaagaaaactaccacatgatctttatttttaaattcttgggttaagctctggagaattttcataggcaaattctgtgtgggctggaacagtaagcactccaataaaatctatctccaggaagaatggaccacccactttatcagccaaggtgaatgctatagaagagatcttgtcaagcagaagctgactctgaacatcctgcactcttccttgattagggaaaaaaatttggaaaaagggatcttgacctcctgccagtaggagtccccacgggtgaacatgaagtaactatacatctgtttttcctctggattatatctgtgtcctccctgatattcatcatccaaggccaaccatccccacatacacggagatacagagtactgaactgggaccaatcataagacattttcctaagacatcttcctctcaaaagcaccccctggaatcctggatatcattgcacagtacccacttcaggtagtctccccatcctgaggcacctcagagctcagagttccatatagcagtgcactttggttattcttgcccattttcaaaaatacttcacttctgcctccaatcgtcttttcagaagtcactatctacttatccaagtcttctttcccccagaactgtcagacaaccttggcttgttccagcaagacctcatgcagagggcggccttcgggtcctatccaatgatccacaatttcatccttcaaatgcctaaaatggtcctttatttcatctctaattgctttattgaaactaacttcaggtttctcctcaggagaagttatatccaaagcaacttctttctggtgatgtccttggcaacccccttcagtattcctctgtgaggaggctttgccaggagaagccactagtttctgaagactactggagtggtgtgcaaagtgaatacccaaaaatgaatgcaaggtagcagttgtcttagagcattttctgagaatataagtgccatgcagcaatttgtgaaccaaagccatggtacgaaaaaatcaaaatgtaagtttcttcctgggctaccaagggctaccaagaagcttcagcaaatagcccaattctaccaaatgccagaagctgctctaagtgtattttcattgacggctcacaacaaccctgagagaggtactattatcatttcaattatagagatgaggaaatggatgttccaagactaatttacagaaggtcacacaggtagtgagtagtaaaactcttctgcctcggggtttgcctccggcactcactgcctgacttccacaggctggacgttccccacgctggagagaaaaacctctttatttctttaactttctttatatctctcttatttcctggttccttttaccttgttttatataaaacctttacataagctttgaattagacaaaagagtgtatacctttttaaaaagcacacacctgtttttagaaagaatgttttcctacaatatattttgttgaaaaatacccaaataataaaatatctattatttaatagtaatttagattttaaattatgacaattttatctacaagtattcatcccattacatttacctaattatcttatgttaatcacttacctacattgtttatgaaactgtgataggcatcatttaaaattatgaaaccaccataactgagacaataacaaagatctgacctaactgactccatcttgactctaacctccacactgtccttgttcattcctgggcataggccaaacaaactttgggaggaactcactttatatttagctttgaaacgaagatgataacagtcctttcccaaaaccaacttccttactgcctgtggactagaccacctaaagccacaagattagaagttacggtaatgttactaaattcaagatagagctatttttattaaaccaatatcaatgtcttatttattaaagattacacaagcaaaggtcattctgttttggctgtgtttatgcttttgcaacccctatgtcaagttttgacaccttatagtatttggcagg[353 bp omitted]gaggcaggagaatggcgtgaacccgggaagcggagcttgcagtgagccgagattgcgccactgcagtccgcagtccggcctgggcgacagagcgagactccgtctcaaaaaaaaaaaaaaaaaaaaaaaaaagaaaaaaaagatacaaaaaattagccaggcgtgttggcaggcacctgtagtcccagctactcgggaggccgaggcaggagaatggtgtgaacccaggaggcggagcttgcactgagcagagaacacgccactacaaatccagcctgggcaacagagcgagactacatctcaaaaaaaaaaatgcaaacaaaaatgtatgctggcaattcttaagacatttctaatattactttaataataattttaaagctagcttgtttattaaagattttactgaagtcacataaacttgaaaaagcatttgagtagtcttttctttttctgataatttgatgtacactttttaagccaattaatcagagctcttttatatattttcattagtgaaacattgtttacataacacataaatacacaagatatattagacatgcggaaagaagtacatcttcaccaattcacaaaaaccttcttttttgctatcatggattttcagattcttggtaacctgtttcacaactctaggcagttgtcagtgaaatagccttaaatttgcatattaaaggaaacaactcaggtgaaaatcaaatagaaaaatttgcattataaagtatggaaagaaagagtctggtgtgctagaaggagattaaagagggatgccaaatcaaacataaaattataaaaatttatcatagaatggtataaggagaccaattttatttagatagggattatctatcctttaactggctctctgagctctgggcagaaacccacactgaatgctgtgtttccaaaaagggagaattattatgaggctagaccatgtgatgtttttacagtgcacttagaaaaaaaattttgtaaacaatgacatttctaactgtctaaactatacacttctttaaaacccaaagagtagactttgttgtgataactattttagtcaataaatcaggtaacacaatacaaaagcaagcagtttaagagctgagatgaacttttctgtttacactcttggggtttgataaggaaaaacaggtgtctaccccaagggagttgcaccttctccattttctttaaggaacctcagactatgataaactatgtcacgttcctcatgcagcagagggtgcaagagaaaggagagacagcagaagtaaaagaagaaaacagaagtcagtcagctgagaagaaaaaacctttgctcaattaaaaaaaaaaaaaggtagagttgataaaacccaatggggaaaaaaagcaaaacagcaacgaaaacagaaacaaacaacaacaacaaaaaacatttaagcaaaacaaatgatcacacaacttatatgattatggagtgctctgatggtaacaagaaatgaagaccagctggttgctactcttctctttggccaagacaatccccaactcagttacttatctagggatcatgggtcacaggttgaagcctgctctctaccattaggggagcagggcaaaaaacctcatctttcctgttgaaggcaagctcaaactccataaaggagttgcctgaaggaaaacctggccttttttgtgttagaagcaagtaaaactctagaaaaaaaaaaaagaaaaaaagaacccacaaaaaccagagttgtacagcaaaataaactttagatatcaacggaattttgggtcctaatggtaccccattagctcagggggataagcggaagataaagcactttgtaatatgcattttagaaaaccaaggccaacctctctattacttttttttattttttattttttttttagacggagtctcgctctgtcgcccaggctggagtgtagtggtgccatctctgctcactgcaagctccacctcctgggttcacgccattctcctgggttcacgccattctcctgcctcggcctcccgagtagctgggactacaggcacctgctaccatgcccggccaattttttgtatttttagtagagatggggtttcaccgcgttagccaggatggtctcgatcccttgacctcgttatccgcctgcctcggcctatcaaagtgctgggattacaggcgtgagccactgtgcccagcctcaattattcttgttgtaaccgagcaagttacagagaaacgccacacgctgagacaaattcaggagtcctttattagccagagaccgagagacggctagtgctcaagattctctcggccctgaagaaggggttagattttcttttatactttggtttagaaaggggagtggggggagtctagttaaaacaatcttacagaaataaagcaggcaaaaagtaaaaaggataaatggttacaggaaagcaaacggttccaggtgcaggggttttaaatccatcacaaggtgataggcgcggggctttgggtgttatcaaccggacacaaacgcggggggctctgggtgctatcaactgggcaaattcctaggaactgcagatatagcttgccacagtatcttatcagttaattgcactcttggatgtgctgggagtcagcttgcacaagttaagtccttgaggaagggggtgagtaaggggctgtaagtgaaggagccaagatggtgtctgtctggctctctcagctaagggagagtcaattcaggttaaaacaaggtatcatactctaaactgtctataatggaccaaaagccagataagactcctgtagcctttatggaaaggcactaatagagtatacctccttatcccgtaattcagttgaggaacagctcatcctgaaggacaagtttattacacaaggcagctcctgatagtagaaggaaactacaaaaccaaggtacaggaccagacagcaccttagagagcctcctgaaagtggccacttcggtctttaataatatggaccaggaggaggatgcccaaaagaaagagagcaagctcgggagacggacagaggctctagcagcagctttgcaggcttgcaacatccagaatccccaaggtgcatctgctagttgctattgatgtggcaggccagggcattttaaggattgcccaggcagcaagacgaagcaacttcgaccctgtccagcctgtggcaaaaaccactggagatggaattgcccccagaggcggaggtcactgggttcaggaccagtttcacagacggtccagcaggactgatgggtcccggggctcaaatctcggctccagcggttcaaactgccattatagcacaggagctctggatgattctggaaattaaaggaaggaaagtaaacctccttccaaacactagagctagtctctctctgtcttctcctctctaatccagatctcccctctccccagagcatgaccgtaaggggcatctcaggaaaaaggctaatccaatctttttctcaaccttagttgacacacgcttgcaagccattgtcatgatagctctactagtcagaaaagcctccaagttaaccctaggaaataatttaactgtttacagcccacataatgtagcagaatcacggtcctctagggggagctcttagctgacagccagtaaagcaagatgtacataaggcaggataagcagtagtcactctccccaggcacaaacgctcaattagctgagctaatagctcttacaagagcacctaaattaagcaagggaaaggcagctaacatttacactaactccaagtatgctttcatagctctccatgctcatgctggggccatttaaaaggaaacacattttcttaccactaatggatctcctataaaatatcaccaggaaattagcaggttattatcctcagtttttcttccacaaaaaaatagcaaggatgcattttaaggaacattaaaaggaaacaaggtagccgaaagaaataaattagctgatcaggcagctaagtcaaaggcatgaaagcttcgaggtattaacacacttcaagccccttctaatctaaaaagactctgtaagagaaattaaacctcagtattcccctacaaaaatagaatagactacttctctagggcatacttttcagccctcaggatggctacagtcaggatggcaaactctatttgccagcctccagccaatgaaaagttcttaaaatccttcaccaagcttttcacttgggaaaggataaaacttatccatgtgctcagaaattgttttcaggcaggaaacctctaaattggttaagcatgtaacctctctagctcacttccagcaggaaccacctctatttaacccaagaaatttggtattagtaaaactctcacctctgtcaccttccctaagccaagctaggaagggccctacactgttgttctctcaacccccttgggcagtaaaagttacaggaatcaacttgtgaatacatcacgatcaagccaaagcctgcaaagctgaggaagcaacccctgacggtcca[143 bp omitted]gaaaccctgtttctactaaaaatacaaaaactaattcaaattagccgggtgcagtggtgggcgcctgtagtcccagctactcaggaggctgaggcaggagaatcgcttgaacccgggaggtggaggttgcagttagccaagatcacaccactgcactccagcctgggcgacagaacaaaactccgtctcaaaaaaaaaaaaaaaaaaaaaaaaaaagtagaagatcttaagctgaaaatcataaaagataagtaactgagtgagggctacgcatcttactcagtcccactcctaccttatcaaatactttttattatttctaaactttcctctcaaagttcactgccaaatattagaacttctttttaatgcatatttgcagagagatttaattattcatagaatcatatttgtaactttgtaaatccccaaagggacatgttatgtcttggcaagtaaagttttaaatgaaaattatttactatgccactcttgtgaaaattgttctagtcaagctactatttgcaatagaactaaacgctgtggcactcacaatgtggaattctggttgtaaaattctaattgctgtaatattttgccagattatcatccttataacaggattaataattgcaggaaaaatttagtcaaggttgttttgcttatagcaggactaatagttatggataagaagcatgaaagttataccatcactaagtttgaaaagactttttactaaaggttggtaatataatacacactatgaaaaggttataaaggaagagattttatgtacggaaggattttgtatggtaaattcttgtactaaagggaaataaccggttgtttaaagaaaggatgtttaggacaaatcaaaaagtgtaaaggtgttgtaagaaggtttataaaagtcataaaagaatttagtaattaaaggaaaggaattgtcaaaattaacgctaaagttattttagccacccaataatgtctttctcccaatcatattgcaagttgtaaaaatggcctaggcctaaagttattctctaacggcagattaagggggaaatgtccgcttttctctaggaaaaagttaccgctatattaacgtttctggtaatgtacaccgacatctagtggaggcaagccagtattgcaatccattggtgtaactaaaaggtgtcaaactctactgtcagttatggtctaacagggccccccactaacggtggtaattttaataattgtatcctaaccctacattttaaatcttcttgtaaaatttatattttttcaccttaaatcaaataaagtttaatattttaatattttattaaataatgttttatttaataaaacattaaataaagtttaatagaagcaattaaactttaaatggtgctgtgagctgagccacacacagacatgccattcttctgagaacctcagatcaaccacaggagaaggcccaattgctgtccccccccaaccacacgccccttttcagcagacagtacccagaaagaatcatcatctaacaccccctaacagcagttaggtttacttctctttgagggggggatattacaggagttattaagaaatcattttaggcatacagtaagggtaaaggttcttggtgaaaattttcctgtaataagaaatctcttttctaaccaagcaatctcttttctaaccaaaaaggcggcttcaagggccgggctgacaagctttgatatgcaaatgctggccactagaaactgggtccactcaacatggtgattcccaccgtcttctccttgttaccacctgtgcaaagtgtgaaggccacctccaagtaacaccatgtgttcaaaccatcatggcaacccacatttgcatattaaaaggctatggcgggagggcctggtttctcccaggctacatgaataacacacctggtcaagccaatcctttgggccctatgcaaaccagatactgcctcctccagcctccagatataagggactgtctttctgttgcgcacagggtctatctctgttcctttcccatgtctcagtacgggggagctgttctcttctttcttccttcttacttgctattaaacttttcactccttaaaactactccacatgtgtccatgtcgttaatcctatcagcaccagaccaaaaagcctggtaatcgtccagtcatcggagctgtatcaaaatgaacttgggctgctctgtcccaatgtctccatcctttgcatcttaacctgtcgcagaacaagaaaagtggtgccgctaagattgcacaggtgcagcgaatacgaacctgggaagactgtggtgtttctttagatggctggtggatctatctggattgaagggattccttttcccagcaataattttacagacctgagacgtttgcaagatgaaattgtgttgcgggatgaagatgtcattacactttcttacccaaagtcaggtagggaagtgggacccgaaactcaggaagggatgcggtgaagatactgatggagtgccttctttatgccctgcgcttgggtatgctttggtggatagtgtggggtttttttgtttgtttgtttctttgtttttgagacggaatctcgctctgtcacccaggctggagtgcagtggcacgatctcagctcactgcaagctccgcctcctggattcacgccattctcctgcctcagcctcccaagtagctgggactacaggcgccgatagtgtggtgttttaacaaagcttctactcagagagacggattaaaccagacaattaaacataatgcaaatgaatgtgattactggggcactgtagagacagagagagacatgagatcccacagaagctaaggcagatttaagtgatcatgcaggatggttagaagggactgattattgaaagaatttcggtgaaaaaataaacatttatccttagatgctgagcgtgaatgtgagactgttagatgtaaaagaaaaaatattctgacacttgggtaaatggtgaggaagaatattcaagacaattgcaacaggggagagagacccaactctgaatatagcaatgatagttggttttttgtagacaattatcaaagtaaggcggtcagtgggtgggaaattacaaagaacaacttgattaggtatcaggagcagaatccttgctaaaggcaggccaaagatttagacattaagagtggaacatgggaaatctgatcaggtatcaaggatggggggattctcattacccttgttgaaactgggtgcaacacagtttcaacacagatgtccaaagtccaggcctagtcaggaagaggactcagggaagcccaagtcaagtctggtcgaggagaaggtctttgccagatggcagtgtttcgatctattacactacagacattgtgggccacataatacattttcagggggaagagggctgtcctgtgcattgtaggatgtttagctgcatccctggcccctgcccactggagtcagtagcatactcaagtgtgataactcaaaatgtctgcagtcactgttaattttcccttgaggtggacacagtttaccccagctgagaaccgcatggatgaggagaaggcacatacatatgcctgaggtttcaggcaaagaatagtagacatgtgttggtgtcatgcattgaggcagagatcgctggtggagaagcacatacagggaagctgggattatcgagtgtaacggatactacagtgtaactagagaaagaatatgaaaggtgggaaaatgggagtgaaaatattgtaatatttagcaagtgcatgtgtgcagtggttcaatggtctattctgtgcattaagactatttggtgccattgttttactgggctgagcttatttcacttaacataatttcttccagttccctccctccatgttggctgcacatgacagttttgctctttttaaaatgatattgaggccgggcgcggtggctcacgc[131 bp omitted]gcgtggtggcaggcacctgtagtcccagctactcggaaggctgaggcaggagaatggcatgaacccgggaggcagagcttgcagtgaaccgagatcgtgccactgcactccagcctgggtgacagagcgagactctgtctcaaaaaataaaaataaaataaaaaataaataaataaataaataaaatgatattgagcagtgggagcaagaatattagggcatccaacagcccaaaggtggaagcagcccacatgtccatcgacagatgaacagataaacagaatgtactctatacaaacaatggaatattagtcgcccttaaaagagaggaagttctaatacatggtaccacatggatggaccttgagggcactatactatgtaaaagtcaggcatgaaaggataaatactgtgtgatccagtcataggaggtacctggtatagaaatattcatagagagggaaagtagtgtggtggttgcgaggagctgatgggaagagaataaaaagagttgctttttaatgtttacagagtttcaattttgcaaagagaaaaacattctggagatggatggtggtgatggttgcatgataatgtgcatatttactgaaccggacacttacaaatggttaagccagtcaattgtttgtttgtattttaccacaatttaacattttaaaagttggttttttaaaagagtattatgacaaaacagggtaaagatggccacataaaggtgaaaggaacagagtacctctagaataaagcatcagttgaatgcacttaagactaagatgaggaatgaaaacaccagttggattgatgggcaggggcattattgctgaaataacacagggtctttaagatgtagtggtggggtcaatgtcacattgaagtaggtgacaccttcttcttttttattcaggaagcttttggatagtggaaatcatcagtctgatccactccaagggagatcctagttgggtccaatctgttgttccctgggatcgttcaccatggatagaagttaaacgtaagaaagcaggtttagagagtcagaagggcccacacctctacacctcccaccttcccattcagctcttccccaagtcattcttgaattccaaggccaaggtgagttaataatggaatgtcagcgtggaccactttctgacggctgaatgactgtgttttagggacagagttaaaatgcgattccctaaactatgcatattagaaaatcttgttccaatctactgtgtcatatacaagacaatgtttctggtatttccccaggaaatcctcagccttcatttaagtaaatcctggctacatccccaaaactgaggaccccaacattaatatgctcatgtggaaagcatcttagctgtaaaccagcacctgaatttcagaggaaatgtgggtgtgacactgatatttgaaacccaacgtggtttttctattgaggatagtaatcatgatgtggggcattttgttcccaattgacagctccacgggtctcccatacataatttcagaagctccacatgaagcctctagcattgagtaaccctgggcagtaagtgtgaactttttctcatgatagattattgcttaaatcaaaacttaccaaaactatcaaaattgtataaaactgcctccaaatgtctcaggtgatgtggtagtaacagtattatcaaaatgttctaatattacagtgtcacaatgtattaatactgtgctgtatttctatttgcttatttactgtcaggttcatttattttactgtatactccatgattttgaagatcatgtcaatttttttcccaatttttactgttttacactgacttagctgatgcttaaaacattgtagagatacaagaaaatactggaaaaactaaattaaaaaataaagtaacaacaatagcccaagaccaagctctgtaaaacaattatgactgtaaaacaattatgataaaatgatttataacagaaaattccaacttgaactttggctccagactgtgtttattggcaaatagtgcaagatgtttgaagcgcagtttgtgtgtgtttaaactggcagtactgatccttccatgtatttgttcctgattatttattaacttagaatatgcatccattctttattccttcatatgtttaggtattaagcacctattatgggtcaaggtttgaatcaggattgggaagaaggtaatgattatgatgacctcaagtcacaacctaaagaaatttacagattagtatttgggaagacaaagaacagacatacacttattttctgtggtgccaatattatttactgacatcctcattaataccagataccagtgtgtagttggtgaaaaacatctactttaagatatgcaataaatagatgaaaggatgagacagggagaaaaatgtagggaaagtaccacattgtcccagaaggtaaatgcagggtttgctgatggagttatgcagatggaggatttggtaactgtcttgtagcgggacaatcagagatgggagagactgaacagagttcaggagagcctttattaaggtgagcacctggctcagtaggactagcgtccaggaaagtctgagccccgaacaaagagagcagccaccttttaaacaatcagtggtgggaattacgtgatgcaggaagcgtacttacagaagcgagaagaaaggcagttgttactccatgtcttacatccttgggaatacatggttgtgtaatatatacgtatcaatcttatgaccttgcagctgtgctggggaggtaagcaagaattcacagagctctaaggaatgtgaaactggggagtatagatgaggctcatggagcacagaaggagcacaggctgttaatatccttctctaacttctactacggggtggggacgggggcgctaccttataactaagccctgaggggaaagttaattttctggcttcacatattgtaaaattcattaatttcctcttcagtctcagtgaggagaaaaccaagagtgtataactgattccatttaccccatatccttctttgtgcaattcttataatttttacttttgcctgcagtataaaaactgcctgtggggttattgttctttaaagagtcggtagtgttttacagcaattccatcaggaaagaaaatgttgtcttttatatatactcctttactgcttctcaggttcatccctggacctgcactatgattcctgcagactgaaggagttcctttagaactggttgtcatgtaggttgtaggcaataaaaattctcatagcttggcatgtttctaagattaccttgatttttatcctcatatttaaaggatattttcataggatatagcattaagtattttttattcttcagcaatttaaagacaattttccatttgtgttaggcctccattttttggatgagaagtcagggggccttcttctcctctttctccactgtctgtgacgtgtctgtttttgtctggctacattcaatgactcagctggatgccaagggtgttaaggaactgttcatagtcactgctgtgtgttaacaagtttggagagtgaggaataataaaacatatcactgctatttggtaaatgtctggtgatcttgcctcatgcatgcgaagcccagccctcagccataagtgtacagagacccctgacacagactttatcattacataatacttacacatgttttgttggtacacgcagtattttgatacatgcatacaatgtataccaataaaccagggcaactgggactccctcaccccaaaccttcacccatctttatgttgggaacattccaattcctcttccccagcaactataccacaaaatattgttagctatagttctactgtactgtcaaatactagatcttaatccttctgtccacatgaaaaaaaatcaaattcaaattgaaggacatttgataaaaaaatttgacaagtgctcttcaaaactacaaaaacaccctgaagtacacagaccaacgacaccatgaagcaactagattaacaagtctgcaaaattaaccagccagcatcatgatgacaggatcaaattcacacataacaatattaaccttatgtgtgaatgggctaaatgcccccagtaaaagacaaagactaaaaaattggataaagaatcaagacccattggactgctgtattcaagagacccatctcacgtgcaaagatacacctaggctcaaagtaaacggatggaggaaaatttaccaagcaaatggaaagcagaaacaagcaggggttgcaatcctagtctctggcaaaacagactttaaaccaagaaaggtcaaaaaagacaaagaagggcattaggtaatggtaaaaactttaattcagcaaaaagagccaactatcataaatatatattcacccaatacaggagcacccagattcataaaacaagttatttttattttgttttattaggactgaatctctctctatctcacaggctgtactgcagtggtgcgatctcagcttactgcaacctccacttttcaggatcaagtgactcttgtgcttcagcctctcaagtagctaggattacaggcgcccactaccatacccgtctaatttttgtattttgagtagaggcagggtttcaccacgtaggccaggctggtctcggactcctgacctcaagtgatccacccgcctcagcctcccaaagcgctgggattacaggcgtgagcctccacgcccagcccataaaacaaatttttaaagacatacaaagagacttgaatacccacccaataatagcgggagactttaatacctcactgccaatattagacagatcatcgagaaagaaaatttagaaagatattcaggacttgaactcagccctggatcaactggacctgacagagatctacataagtctccacccaaaaccaacagaacatacatttttctcagtaccacatggcacttactctaaaattgatcacataattagaagtaaaccactgctcagcaaatgcaaaagaactgaaatcataacagtctctcagtccacagcacaatcaaattagaactcaagattaagaaattcactcaaaaacacgtaactacatggaaattgaacaacctgctcctgcatgacttctggataaataataaaactgaggcagaaaccaagaaattctttgaaactaatgagaacgaagagacaacataccagactctctgggatgcagctaaagcagtgttaagagggaaatttacagcactaaatagatccaacaaaaagctagaaagatctcaaatggacaccctaacatcacaactaaaagtaccagagaaccaagagcaaataaatttcagagttagcagaagacaaggaataaccaagcacagagcacaactgaagaagaaagagacacaaaacacccttcaaaaaaatcgacaaatccaggagctggttctttgaaaaaaaaaatcaataaaatagatagaccattagctagactaataaagaaaaaaagacaagattcaaataaacacaatcaaaaatgataatgatgacattaccactgaccccacagagatacaaactactgtcagagaaaatgataaacacttctatgcaaatcaatcagaaactctagaataaatggacacattcctggacacatacaccctcccaagactcaaccaggaagaagttgaatccctgaatagaccaataacaagttctgaaattgaggcagtaattaataacctacaaaccaaaaaaagcccaggaccagatggatttacagctgaattctactggaggtgcaaagaggagctggtacatttcttctgtaactattccaaacaatcgaaaagaagagactcctccttaactcattttatgaggccagcatcattctgataccaaacctggcagagatatacaacaaaaaaataaaacttcttgccaatacccctgatgaacatcgatgtcaaaatcctcaataaaatactggcaaaccaaatccagcagcacatcaaaaagcttatccaccatgaacaagttggcttcattcctgggatgcaaggctggttcaatacatgaaatcaataaacataattcatcacataaacagaactagagacaaaaaacacaacactatcttaacagatgcagaaaaggcctttgataaaattcaacatctcttcatgataaaaactctcaataaactaggtattgatggcacatatccaaaataagagccatttatgacaaaccgacagccagtatcatagtgaatgggcaaaagctggaagcactccccttgaaaacgggcacaagaaaaggatgccctctctcaccactcttattcaacacagtattggaaattctggcaaaggaaatcaggcaagacaaagaaataaagggtattcaaataggaagagaagaagtcaacttgtctttgtttgcagatgacatgatgctgtatctagaaaaccccatcaactcagcccaaaaacttcttaagctgataagcaacttcagcaaagtctcaggatacaaaaccaatgtgcagaaattaaaagcacttctataaaccaagaacagacaagcagcgagccaaatcatgaataaattctcattcacaattgccacagagaaaataaaacacctagaaatacagctaataaggggaagtgaaggacctcttcaaggagaactacaaattactgctcaaggaaatcagcgaggacacaaacaaatggaaaaacattccatgctcatggacaggaagagtcaatatcatgaaaacagccatactgcccaaagcagtttatagctttaatgctattcccactaaactaccatctgatcttcaacaaacctgacaaaaaccagcaatggggaaaggattccctatttaaaaatgatgttgggagaactggctagtcacatgcagaaaattgaaactggaccctttattacaccttatacaaaaattaactctagatggattaaagacttatatgtaaaaaaaaaataaaaactatagaaactctagaagaaaatctaggcaataccatacaggacacataagcatgggcaaagattttatgatgaaatctctaaaaccaattgcagcagaagcaaaaattgacaactaagatctaattaaaccaaagagcttctgcacagcaaaagaaaactatcatcagagtgaataagcaacctacagcatggaagaaaatttttgcaacatatccatccgacaaaggtctaatattcagcatccataaggaacttcagcaaatttacaaaaaacaaaatgccattaaaaaatgggcaaaggacatgaacagacacttcttagaagaagacatacatgtggccaacaaatgtgaaaaaaaagctgaatatcactgatcactggagaaatgccaatgatcactggagaaatgccaatgaaaaccacaatgagataccatctcacaccagtcagaatggcaattattaaaaagccaagaagcaacagatgctggcgaggttgcagagaaataggaatgcttttacactgtttgtgggaatgtaaattaattcaaccattgtgaaagacagtgtggtgattcctgaaagatttagaaccagaaataccatttgacccagcaatcccattatggggtatatacccaaaggaatataaatcattctattttaaaaatacatgcatgtgtatgttcattgtaacactattcacaattgcaaagacacgaaatcaacccaaatgcccatcagtgatagactggataaagaaaatgtggtacaaatacaccatggagtactatgcagccataaaaaggaacaagatcatgtcctttgcagggacatggatggagctgaaagacattatcctcagcaaactgacacaggaacaggaaatcaaacactgcatgttctcacttataagtgggagctgaacaatgagaacacatggaaacagggaggggaacacacacactgtggcctgtcagaggagggcatggttgggaggagagtatcaaaagaaatagctaatgcatgccaggtttaatacctaggtgatgggttgataggtgcagcaaaccaccatggcacgcatttacctatgtaacaaacctgcatatcctgcacatggtctctggaacttaaaaaaacaaaaaaaaggcagggtgcggtg[131 bp omitted]ggtggcgggcacctgtagtcccagctactcgggaggctgaggcagaagaatggcatgaacctgggaggcggagcttgcagtgagccaagattgtgccactgcactctagcctgggcgacagagtgagactccgtctcaaaaaaaaaaaaaaaaaaattaaaaaacccactgaaaatgtgtctgtaatttctttaataaatattgtacccatgtgaatttttaaggttcacagatataccacacttaagtatgaaagtaacattatgccgggcactatggcttgtgcctgtaattccagcactttgggaggccaaggtgggcagatcacctgaggtcaggggtttgagaccatcttggccaacgtggcgagacccccacctctactgacagtacaaagaatcagccgggcatggaggcatgcgcctgtaatcccagctacttgggaggctgaggcaaaagaatcacttgagcccaggaggcagaggttgcagtgagccgagattgcacaaaaaggcaacagagtgaggctccatctcaataaataaaataaaataaaataaaaaagatggccggacgcggtggctcacgcctgtaatcctagcactttgggaggcccaggagggcagatcacgaggtcaggagattaagaccatcctggctaacacggtaaaaccccgtctctactgaaaaatacaaaaaaattagccaggtatagtggcaggcacctgtagtctcagctacttgggaggctgaggcaggagaatggtgtgaaccagggaagcagagcttgcagtgagccaagatcatgccactgcactccagcctgggcgacagagtgagactctgcctcaaaaaaaaaaaaaaaaggtaacatcagccaacgctgaagaacatgtatacgggaactgcctgtaccatttttacaactttttagtaatccaaacatattttaaaatacaactactcaagaaaaaagaaaaaaatttactacttcataaaagcattttctaaaatgattaatgtcccaaagttatacattcctgtaactctcagtacctctgcatttttaatgctccttgctgtttatatatttcagtggttacctgcccatatttctctagttttcaggtgagggatatgacaagagcacacagatctaatggattttaaacagtgtatttgtctctgaacagcatcctcttagaaacactcacctctattactcagattacacatttgccagataagcgaaatgaattcatcctcttcctacttctctttttctcttcttctcgtcttccttctctgctgcctctgtctgttttctttttccccaaagtgtatttatcctcatgttctcatgcttgtggttctcatcctaggacataagagccagtggagtattgctataaagatatctgaaaatgcagaagcaacttcaaaactgggtaatgggcaaagattggaagagtttggagggctcagaagaagacaggaagatgaaagaagtttggaatttcttagagactgttaagtggttgtgaccaaaatgctaatagtaatatggacagtgacgtcctggctgctgaggtgtcagatggaaatgaggaacttattgggaactggaacaaacgtgacatgtgttatgccttaggaaagaacttggttgaattgtgtccatcctttaggactctgtgaacatttgaacttgagagtgatgatttaggttatttggcagaagaaatttctaagcagcaaagtgttcaagatgtggcatggctgtgtctaacagcctatgttcagatgtgtgagcaaataaatgacctaaggttggaaattatattctatttaaagaggaagcagaccatagtagtttggaaaatttgcaacctggccatgtggtagaagagaaaagcctattttcaagagaagaattcaagtgagctgctaagcaaccacttgatagagaaatttgcataagtaaaatgcaaacaagagctgatagcaaagacaatggcagaaaggtctcaaaggcatttcagagacctctgcagcaacccctcccatcacaggcaatccatccatccagtaaagctagaacatggaggaggggatgaacagctggagagcttctgggcaggaaaaaaatccttaagtcaggcaaagaatagattgaggagacagagaacctgaagggtgacagcactttttaaagctcagtggtcctctgcaggactttttgaaccaagcaatgtagagacagcttaccatatgaacttatgttgttactcaagaaagttgagaactaaataggttttcagctattgtaggccaataataaatcagactgtctattgatattacttttgcttcactaagaaaacaggatactactacagacacatcagaatgactacaattgaaagaacgacaatataaagtcttggaaaggatgtggaatgactggaattatcatacattggtagtgaacatgttatatggtacaaccactttggaaaactgacagttttttaaaaaattaaacacacaactatcccatgaccctacctctattacaagagaaaggagtgcacatggccatagagagatatgttcatacagctttattcacagcagttaaaaacttaaaacaagctggatgtccattaatgagtgaatgcataaactaactggtacattcatgcaatggaatgctactaagaactgttgacgtataccctacacatatgaattgctaacattatgctaagagaagccagatgcaaaagaatacatattgtatactattctaagaaggccaagaactggcaaaatgaatctatgggataaacatcagaatagtggttcttctaagggggtgatgaatgggaaggagctcaagggaagtttccagtgtgatggaaatattctttaccttctaggtgatggttacatgggcatacacatcatcgtgctgtacacttaagataggtacatgatacttcaataaaccatttttaaaagaaaacatccattcctggaaacagaacagacacatcacacataaacaagaacgctttgttcttatcagaatgtattacttcatttaaagtcatggtttggccctctggttggtagtggaggccctccaattcctatgacttgactaattattgttgatcttgagaaatgtacataatgggttgtatttgtttggctatagaaaaaagatgagatttctgtcttagcaatctctttagccgactgcctatggtacatactggattctggtgtaatgcttattcaataataaaactgttttctttcccttctacctttgtagcgaggttttctgggttggcaggaagtttctgtttttatttcctcaacaatagacacgcagtttccctatacaacatggttaaaaggcttaagcagctaaaattcactacctgctattcaaagatgagtctcatatggatacaaaagtgaacgtgtttaaagacattactgagacttccagtttctggtccagcaaggagctggaagtcctcactccatcctaacaacaaataaaaagctgaacaaactgaaaaatcagcaattcttcttagatctgtcaaataagtgaggtcacaaggcaagctactgcctccaaagttggagacaggcagacacagagaatgataacttaccagagcagaaactcacaagcagtaatctttgtgcctctgcaggaaccagaacaaggttaggaaaacctgaactctaattgatgaattgctggaagctgaatgtggttaagtctgagaattaaaaactccaagaagaccttgccatagagctatctttacactttcgtgagttttatctccaaggactctagcaggttctcacagtgaagatctgagaaaagtccccagctggttctggcaggggaagaggaagagtagccattttgaaatataccacggcattctgttcaatgctcaggagagaaactattttatcagagcctaccgtcttggggttttatcagtgtccaaatgacctggaagaaggaaaataaacaattctggtcccctcttgccaccctgtcccacttaaggggaaagggttttactcggaaggacttgtgaaattcatagtccctgggctcaggataagagactgaaacctttgggagg[135 bp omitted]gaggcaggaggcgg[137 bp omitted]gccgaggtggctccagtagcctgaattcttaacctaagcaaacccaaacccaactcagtgtaactggccttaaccaatcagaaaccaccaattaacctcctactattgacttcccactggaatgatccaaataaggctctactctaaccaatcaagtattttctttgccttgtttctgagttcagcctgtaaaagcccttccctcatgcctcttcagagaggccctaagctgcatgtgatctggcaatgcccaattcatgaactgctatctgcttaaactctttaaaattttaatgtgcctaagtttatatattatttttgcagaccatagaacacttcccctctcacaaccaaatcttatcaccatgttactaaagacctatcatgcggctcattttaccaagtacatcatattcagctatcaggaaaaaattacaaggcactctaataggcaaaatacacagattgaagattttacttaactcattaatgagaaaaactggtgacgtattaaaaccaactcataagagaacccttccccgagccgaaaaaaagtcacatttatagatcaagaatattaaagtggctggctgcagtggctcatgcctgtaatcgcagcactttgggaggtcaatgtgggaggatcgcttgaggccacgagtttgagaccagcctgggtaacatagtgagatctcacctatacttaaaaaattagccgggcatggtggtgcacacctgtagtcccagctaatcaggaggctgaggcaggaagatagattcaatccaggatgtcaagcggtcgtggctgcagtgagctatgatggtgccactgcacttcagtgttggcaatagagtgagatgctgtttcttaacaaaacaaaaaaaattaaaattaaaatgatatgcagcagcaaaagaggcaaaaactggcctcctcacaaatggagatggaggagggaagtaagctgagcctcctccaatttacttttctgtaaacaagaagtaatttgaactgccatcagtgatccacaatgtgagttggtaaatagctcaaaacaatgacaaagtagaatcaaatgacctaaaagcccatgatctaaataatgcactgaagcacagtttctccattcattgcttattttgtgccaggcacatttatgagcacttaatcctcgcaacactattagctaagaaatattgttccgtgcacacatgagcaactgaagctcataaagattaaacaattaagaaaaagtcacacagcagacacactctacagctcaagtgtcaaccaaacacccacagagatgcatatagggtcacatatcaaatcacataacctcacggagaatgggcctaacctcacggagaatggggccatcagatacaccaaagcagacgctcggtggtcccaaccacctctcataacactttcccaaacttaagacgcacatgtccacgccaatgtattatcataggcccttccccccctcttaaagcctcccacgaagtctgaacctggtactgatatacgcttcagccctcagaaggcaaccgcttgattctctgcgcaggcgcagcgttctcaacaccgccaacgggcacaaagccacgcccccacggccgaactcacgcctacgtactcagtcaccagcggaaccctctccaccaggctccgcgtcgaggccctacggggcgtcaatacgcacgcgtactttgtgtcccaggtagctcgtctcttagccatgtacgcctctgcattccggtcactgggagcggggccgtgggggctgcacatgcgcactgcgagtcctcgcctactcccagaaaccacccgggcgcatacgcggtgcggccgctgcttcaggtcggcgggctccagggagacctgggtgggcagcgtcgccgtttctcctttcttgggcagtatttttcccagcgccacgcggaggctgggccattatgaggtttgtgttgcgtcggggcggtccgtctcagaggcgctccggggaggagtgggcggctgaatggccagaggcccagggatccgttcaggtcagcgctggcgtccgggcctgagtttggaggtggcgggtgccttacaagaatgctcgcgtgatcagtgtgttggcgtttgtgtacacagaggacattattaaaattactctttgtgtgaatggttctatcccagagtaggccactggggcattgaaaaaagcccagttacatttttaggaaccagagctgcacgctaaactgttttcttttgacagtgaaatctgtcgtttttggagtttgttaggaacatggttgaaaatgggtggcagtgggttcgagaatctcgtctttgaagttttcttccttctccttagctctgcatttccaggacctggtcactattcaggacacggttccagcgcagtgcgcgttagccatgtctcaggtaagtttttgtcctgcaacatcataggttttaagtcctgggcacatctaattttgcttacttgggtggtaaagactgacaccggtacaaggctcaggtcttttcattcagcaacacgtgggactatagcaacctctcttctcagagtccatgtcctgtactttagtgttcatttattcactgaatgaattaatctgagtctccactgtcaccagtcttcttttaagcactgtgtggtgggtcagagatacattccctggagaagacaagagcctttatccggggactgtcgtcttcctgaagtaggggtgaatactcagtcatctttgaattcctttacagctccagactgagaggacgcagcatagaaaatgcttatgagtggttcagactcagtaatggtaatctgcctttggaaattttggggaatgggaatgtgattgatatcttaagcatgaaagtccaggttaacaaagtcaggccatttactaggacattagtgaaagagagtgttgtggatcacaggttccagtttgacgttgggcagcttaaagtcacaggcttcatctgtggaattccggaaaatacctattggctttctgtaaatgaggaacaagaagtatgctgcaagggagaagatggatgagctggctatatttcccaaaaaagggttctcttcagggtgtttgcatggtctctgaaattttgtgcaaatacaaccagatttgattcttagcccgctaaatgtagtcaccaagacattttgtttgaaaaatagattttcttctcaaaggggaaacttacattttcttttagggaaacaggcagtattttccctacacattctgtttgttatgatgactcaagctgttcatgaagttgttaaattatatttatgtattttaaaagaaaagttgttaaaaaaatttcaaccgtcatataacaaccatgcagaaaaaaacatttttaccactttattgtttctgtattttgatgtgaagtatttgagcttaaggctttttttaaccaccagttcttatcccatttcctccatacttccaatgcttccttaactctgttgatattttcaccatcaagatagatttccatcacttctgcaagtatttttcatgtagttttccctgccctggccctcagaggaaactaatttcttgttttgatgacagtggatttgttttgcttggcttcacgtaaatggagtcaagtagtcagtaggtgtgtgtctggcttcattaactcaacataatgattttaatgttcattaatgtccattatttgttgttgttttgctgagtattccattgtgttaatatattacagtctacttactcattttcctgttgatagacatttgggatgtttctagatttttggctattattagtaaaactgctatgaatattattgtgtaggctgagtatcccttatccaaaattcctgggaccagaagtatttcagattttggattttttttgttttgttttggaatatttgcattatacctactggttgcgcaacccaaatctgaaatccaaaatgttccatgagcatttcttttgactattacatcaacacttaaaaagttttggattttgaagcatttcagattagggatattcaacctgtatatgtctttttgtgatcttttagaagatgtagtggtagaaaaaatactggcatctgggcacagtggcgcacacctgtagtcccagcaacttgggaagctgaggcaggaggatcacttcagcccagcatttcagcaccatagtgcagcacgatcacacctgtgaatagccactgcattccagcctgggcaacataacaagactgctgtctcttaaaagaaagaaaatactggcatttgaagaatatcaagaaaaaatattcatttaaaatattgtagtctgcctcatttatggtgacagaattcaggatagcaagaggtgtgtcttgaagcaatcttggggaatcttggaggtgttggtaatattcagtttcttgatcggggatctgctgatgggtgtattgcgttgtgaaaattgatcctattggacatgaattcatcatattgatcatggcttactgcagcctcaacctcctagattcaagcagtcctcctgtctcagactcctgagtagctgggactataggcatgtgccaccatgcctggctaatttttttatttttttgtagagactaagtcttgctgtgttgcccaggcttgtcttgaactcctggcctgaagcagtcctcctgccttggcctcccaaagtgctggtgtggcaggccatgtctcaccaaatgcaggtgtccataacagctgtttcagtactgactgagtggttaaatattaaaagccactacccttacaaagaggctggaatgtaacaaaagcccaccaacagttttgcctcggcctttcctgggccttaaagcatgacaaaataatgaaggagttcttaactggacccatttaggatgaaacaagttttactgggggtctgaagaaaccccccacgcctccacaaacaaatttattggaggtctgaaggaaatccccaaaccaccgtggtttagcaggagacaagataagggtaatcactccagcaccctacacccatttagattaagtaaatttgctgaggctcctgaggaaggtcttcaagactcagaccttggttatagattaaaagaagttaatcacttgtctttagatgaatgcacacctacacatagacatatagcttagaaggtatataagctctggaaaactttgtaattgtgagttggtctggcagtaatttccaggccttctccctgtaaccggctacagaaataaaaactcccttcctccccagttaatctgcatctcgttattgggcctcaataaatagcagcctgaccctcagcttggtccaggaacactgggattataggcatgagccactgcacccagagatccttaagatttcttaaaccccacattcaagtgagaaaagaggaaccttctctgccccatgtttaatacaattaagtttcaatagcttttgacctatgtactgttgttacagatggtgcaagggtgtatttggaaaggacaacacagggcagctgtatatgattggagtgattgggaatcatagttgtattatgagttgatgaagtcccaggatattggaaaggaaaactaaccataggctgggcatcctcagttcttcccaccttcttcctaagtagctgaggatgaaaccttattctttgctcctgttgcacagcctgatggaggcaaataaggtgaaataataacacatctgctgcagttttcagaccattacatctactaccctaaaatgtagctgctagagcaaagactactttatttcctatgattctatgggtgaggaattcacactgaactcaacagggtgggaatgattaatctctgatcctatgatgcctgccagggcctgaatccccaagatgtcttcttcattcatgtattttatatttagctagaattgctggagtcatgtatctgggccactgttctttgctgctagctgagttactcagctttacttgatgtagtctcagaatgtctcactctccattggcaacgtctcattgtcttttcttatgtgtcatgagcccctatgagggcaaaacagaagatgccaagccttcctgaagctttcatctggaactagttagtgttagttctgtcatattctgttgattaaagcaaattgtaggtccgatccagatttaaagaaagaggactacactttgtttcagcaaaaaagtaatttgtaagttattctgatacactacagatccatggtagaattgatcatgactggctttcaacaaagtcaatgtgtggtcatactatgaatatgtaagattataaaatcaactatgctagttcctttacaaattggttttgaatacgtggatacacaatctctgagcaatacatttcttaaattattcagtgttttttgaatcaccctgttcatcttgaatgtttcccttattaagtatttttctatacccaaattttaataaacactatttcacagtattgctctttagtaacttaaataagctgcttttataagacaaagagtccttatcagctcctcccaacttccagttatttccttgggctcttctaaggaagtgtttatcattttcagggatgagtgacattccaagatgtggccattgacttctccaaggaagagtggggattcctgaaccctgctcagagagatttgtacacaactgtgatgctggagaattatcagaacctggtctggctgggtaagtgcttaaagcccttaattcagcaactggtcttgagtatttctttttttgtttttatactgggagtctttggtgagattcagaatttacatgagatgtggaaattggagtgagcagctttctttatcctatctgccagatgttctaatgtttttgtttttataatggcttgtgtttcgattacagtgttgatctgtcacaatacctgagtaaccagagcatagccaactctttctattcacaggactttccatttctaaatctgtgatttcactgttggagaaaaggaaactgccttggataatggcaaaagaagagataagaggcccattgccaggtgagtatgaagaaccaactagcgggggtaagccatgtatatgaaaggcataccaggtctagagggcaaagcacctttaagatgtgaaagatgctctcttccaatgttccatacgtatgtagaaattgaggctccttgagtttgagttcctaaaagggtactgatcacccaccatttatatctgcttttataaatgcctgtgggctcagaaattacaggtgtgtctttcctctttgtctatggtaagcttccttttaaattcaggatcctgtttctcatgactttttttttatttgactctttgatattgttttctttactgtaagatgacttatatagtggtctgattgtttgaatgggtgtattcattggtcatttattcattaacattaattccatttttaaaactagtcaactgttgagagtccccaagaccacccccaggttcaaggacttactaggagtcgtcacaggagtcatcatatcattgtattcatgcctgcaaagttagtgaatagtccagaagaacaccatcattctgatgccagctgcaaagtatgggggtccccaagaccaccctgaattctgacacgaattgcaaatccaaaggtccccaagatgaccctcaggtttgataattcactagaaggattcacagaactcactgaaagctgttacactcatggttagagtttattgccatgaaaggatacacattaaaaatcagccgaggaaaaagacatggggcagagtctcggaggacttccatttatgcccccacagtggagtcatggacagtgttaactcctcccaacaatgatgtgtggcagtatgcacagtgtgtggccaaccaaggaagcctatctgacccttgttatccagactcctcattagggcaccatcatgtagacatggctgactgctaatgtctcacctcaatctctagctcctctgaaggtcaccctaatatcatgtgacccaaagccccacataaatcacatagtttgattatctggtgtggtccaacgcccataggtaaatagagacacttttatcttgcaggatatttcaaggtgtcagagatgaccatctcccaggagccaaaggcaaagactagaactctctttggaaaaggttaaattatttactacacaatggctaagatttattttagcaaaagatataaaacaaaatcagcaaaggtaagctcataaggcaaagtctggaggaaatcaggaatgtgcttccgagattcctctcccaggggagtcacacaggaggtacttaattcctctagcagcaacttgtgtggtatgtgtgagataatagcagctagacaacattagacttagtgccaaggaatttacttagggaagccataaaggtaccctctgccgagtatatgctaaaaatccagaatctcagaaggaaagtaggtgttccgcataaaccacatcatctgcacaaatagcttaggcacagtaagccacttgtaccagttccgggaatggtagaaaccctcatgaaatccaagttccttagaggtcagtcaggggccaacgttgtaagcacacctttctaaggagaacagtctcaaagcctgctgtgttcttttctgagtttgtttaaaagtatagaaacttgcagtgagtttacatttgagtgaggggattaagacttgcttccacaaaccttgtgcaaagtagaaactaattaactagtagaaactaattaaaatggtttattttgatgtgtgggagttagtaaagttttagtttcaaaactgggtgatatttaaagttatagaaagtgaggaaatgaagtacatttgtgatatatttatttaaggaattgttggaattaaggtatgtcttgaactgtgagttacaaatatgtagctggatctcaatagtaattcagaattggagatgaatgtgttttttatatgttttgtggtgatggacccttaggaatggaagaaatgaattgcctatagatagcagagaaggactgattgattggtagcaagagaaacaggaaacatcctgtgttagaattccagggcctcactattcatgaagaaaaggtaaccaaagtaagaccaagacgttaggataagacaacgttgaaaggtagtttatatctgactaatttatggttcttgctaaagtggatatttctatggtgaaaaggatgtagaataatgagcttgaatcgtcacatttggtaataatcttttatttgagttcattttcaaaaccattaggccttcgtagtagaggccccctgtaaaaccagcccctcttgcacccttaatgaggttagccctctccactgtctacatacacagtataatctggaaaaaacagtgggattcccacatgtttagtgcatgaaaaacaggccagactcagtcattttccataattgaccggggttctgttctgttcttttacagcaagcacagccagcatctctgcccctctgccctttagctcctaaacagtaaaaacaactacaggttagaagggtattatgttcgtctttgtagcaagtcctattgcctttctttaatttttgatcctgttgatcagtcttcctgtaatgccattttggcccctgcaattccccatagtacatgttttcttaagctctaaatctgtttccttgctgccttcacttgaccctcttatttttcctgtttgcttagcgatctctttaatctcaaaatgtctatatcagtgagaattcataccctatctgcccctgattatatgattgattttattgtttctatattatgtcaaattgtttctgcagtaaaataattggagatgccttctgtctggacacattaattcctctggttaatgcatacatatacatacagaaactatcatttacctttttgtgttttgaaacttgtggtataacttagcacactgcatcttgtccttttcacttaatacattatcctgcagctcagaaaacagctgaagttcactctttttttagtagctaagtaatactacagatagagatataccatggttaatgatgagggacccctagtttgtttccaatataaagcctatttcaataagcattcttatcaatataaccttaaaaactggtatcttagtttcttgagtaggtgcctaaagtgggattgaaaagataaaagataggtatattacattagtttaatttgcttctgttcattgattttttttcccctttcagatgtgccaggtgcagagattaaggagttatctgcaaagagggctattaatgaagtattatcgcagtttgacacagtgataaaatgtacaagaaacgtatgtaaggaatgtggaaatctatactgccacaatatgcagcttactctccataagagaaatcatacacaaaagaaatgcaatcagtgtttagattgtgggaaatacttcactcgtcaatcaactctcattcagcatcaaagaatccacacgggagagagaccctataaatgtaacgaatgtattaaaaccttcaaccagagggcacaccttacctagcatgagagaattcacactggtgagaaaccttacaaatgtaaggaatgcaggaaaaccttcagccagatgactcatctcacacagcatcagactacacatacgagagaaaagttccatgaatgcagtgaatgtggaaaggccttcagccgtgtctcagctcttatagatcaccagcgaattcatagtggagaaaagccgtatgaatgtaaggagtgtggaagagccttcactcaaagtgcccagctcattagacatcagaaaactcattctggagaaaaaccctatgagtgtagtaagtgtaagaaatcttttgtgcacctgtcttccctgattgaacattggagaattcacactggagaaaaaccatatcaatgtaaggactgcaaaaagaccttttgtcgtgtgatgcagttcactctgcacaggagaattcatactggtgaaaaaccctatgaatgcaaggaatgtggaaagtccttcagcgcccattcttctcttgttactcataagagaacacacagtggagaaaaaccgtataaatgcaaggaatgtggaaaagccttcagtgcgcactcttcccttgttactcataagagaacacacagtggagagaaaccctatacatgccatgcctgtgggaaggcctttaatacttcctccacactttgtcaacataatagaattcatactggtgaaaaaccctttcagtgcagtcaatgcgggaagtcctttagctgcagctctcaccttactcgacactgtagaatgtgtaatggaaaatttagcaaataaccaaaactcaaaatgttaattctgattattctgtatcatcaccagtactttgtactttgagtctttttaaatatgctctgttagtttgtatggaatgatatttcattgcacttttaatttaacttaaaaatgccttcccttgactgttgatatgtattttttgtgaagtgtgtgttgaagccttgcagattattttttaaattagaggtttatcactaggtatatctcctaatgctatccctcccccctccccctaatgtaaatgacgagttaatggtgcagcacaccaacatggcacatgtatacatatgtaacaaacctgcacgttgtgcacatggtaccctaaaacttaaagtataattaaaaaaaaaaattagaggtttttcttcgggtgcatttatgagagttcaccagattttggaaatattttctattctgtaacctaccttttcatttacataacagtgataaaagctttaagtttgatcacatccaattaatcacattttttaatagttatgcttttatttgtttttcagacagggtcttactctgtcacccaggctggagtgcagtggcacaatcatggctcactgcagtctctgcctcccaggctcaagtgatcctcccacctcagcctctcaagtagctgggactacaggcatgtgccaccacacctaatttctatattttttgtagagactaggtttcaccatgttgtccaggcttgtcttgacctcctgagctcaagcagtccatctgcctcagcctcccaaagtgctgggactacagacatgagccattgtgcctgacctagttctgctttttatgttctaagaagtattatttattctatgctgagcttacatagaatttcttccatgttttctatagctatagtgtatttttaccttttactgttagatctatttcatgtttttattatggataatggaggaggtaaaggttgaattatattttcccccatattattgacccatagtgacaccagttttgggagatgtctttcattttcgcccttacgttgttattggcaccttttgcaaaaatcaattatttatcatgagtatacttctgaaatgatctgtttcatcaatctatttgtcttctcagtagttccacattgtcttaattatagctttagaggaagtcttgaaatttggtagtaagtcttccagttttgttattttaacaaatttctctaggctgggcatggtggctcatgcctataatcccagcactttaggagccccagacaggaggatcacttaagcgcagaagatcaagaccagcctgggaaatatagcaagaccttatctctacaaaaaaatttagaaattagctgggcatggtggcacccatctgtagtcctaactgctcaggaggctgaggtgggaggattgcttgagtccaggagttcaaggctgcagtgagttgtgatcacaccattgcagtccagccaggttgacagaatgagaccctgtctcttaaaaaaaaaaaaaaaaatcctggtgatgcttttctggattaaaaaataaaataaaataaaaattggcctcactactctagcttatttgcattttctaataaatgttcagagtcaccttgtcagttcctaccaaaaagcctgtcggtattataattgagattgcatgaagtctgtagacaaacttgaagagaattgacacttaacagcagtgacttccagtctgtaaccttagcataagttctatttgtctcctttaatttttctcagaaatacctgtagttttctgtatagagatcttgaatgtattttcttaagtttattaatagacattttcacaatatgtaaattcgtttgtcttttacttttccagttgtttgctacttgtacatcaaaatagcattttgtacatttatcttgcatcttgtcttgaacatttcacttattcttggagttgtcatacagatttcttaaattttttttttttcttttttttttttttgagacggagtcttgctctgtcacccaggatggagtgcagtggcgcgatctcggctcactgcaagctccgcctcccgggttcacaccattctcctgcctc[212 bp omitted]cgtgcaaatagacagtgtattcatttctggtctgtgctgttcttttttttctcatcttattgcaattgctgtgtgacctccaggacagtgttgaatgaaagtgataaatgtaggcacccttgttttgctttcagtcttaggaggaaagacttagtggggaggaagtggcaactctgagtcaggatgtagacttcttagcatatgcatttgcacatcttgctcaaatcccagatttccctataccctctatgctccctttaaaacaatgctttctttccacagtatctttcccccaagtcaataatgggtcaaatttcagcagtcccaaactggggaagttctgggactgctgtggtaagaaatggattcagacaccaaaggagctgtaggacctggctaacatgtacaagcaagaaccagaagagtatacctgggaggagatcctgagattactgcatcattaggtagaatacaaagttgaataggggagagttttttgctatggggtcactgtatgacaggattaacacactggcaagggaaaaagatgcttctaatggatgctgggacagtttttgaagcttggaaaaagcattggttctcattaaataaaatgaagatagcagaattgccatgacaaatgaggatgggatcaaaagaagtggatatacaagggagaacaagcgtcatggagatggccaatagtagctgtcccctaggcgagggctggctgcaagaggtgctgttaaggaactgggctctctagttgcaatgggaatgataggatctcagaataatggcagccaggtgatagctcttagcatcaaacgcaaggagggccataattaccatatgggtagaaggcttagaatagaatctggggagattgatcttcagaaatctatggttctggctcatagcacatgagtttgccaatggcaagtcatctgcttccaataagagtaaacttattgagacaaggggttgctccgttgcccaggctggagtacatggcatgatcacagctcaactgcaaccttgaactcctgggctcaaataatcctctcacctcagcctcccaagtagttgggactacaggcacatgccaccacacctggctaacttttttgtttctttgtagagatagggtctccctttgttgcccaggctggtctagaattcatgatatcaagtgatcctcctgcctcagcctctgagtgttggaattacaggcaggagtcatagtgcctggcccaaacttaactaaaaaacagagaaggcaaggtgcattggctcacacctgtaatcccaggactttgtgaggccaaagtgggagaattgcttgagtccaggagtttgagaccatcctgggcaacataagaaaaccctgtatctacaaaataattttttaaaaattagcctagcgtggtggcacatgcctgtggtcccagctgttcaggaagctgaggtaggaggactgcttgaatgggaggttgaggcttcagtgagccatggctgtgccactgcactccagtttgagatgccatctcaaaaaacaaaacaaaaaaaccagacagtaaatataggtgttgtggccatatagtctctgtggcaactactcagctctgctgtagtgaaaccaaagcagtcgtagaccataaatgcaatgtgtcactcagactttataaagcaggtagcgggctggatttggtttttataccctgcactaggcaaaatgggatattatgtaaagataaaggtataattcataaatagagggttagtagtatgtccctgtaagtcaaacaatataaattaaaaagcgtaaatgtctggaaactcaaggtgttggcaacatttttttaggaaattctgatccagcataccaaattatatgaaaacatggagatttttactattgcaatctagtggcttaatggacttatttagaaacttgtatccaaaaatgcagaatacatattttttcaatgttcatggtatacagaaatcaatcttgtatttaaccacacacacacacacacacacagtcaaactgggtggcacagcggctcatgcctgtaatcccagcacttataggaagtgctgggaggccgaggcgggtggatcacaaaggtcaggaaatccagaccatcctggccaacatggtgaaacctcatctctactaaaaacacaaaaattagctgggcatggtagcgtgcacctgtagtcccagctactggggagactggggcaggagaatcgcttgaacccgggaggcagaggttgtgccactgcactgcagcctggtgacagagcgagactccatctccaaaaaaagagtaaaattcaaaaagtagataacttcaggccacatttaccaaccataataaaattaaattagatattatatcacttaggatgcttttggctgcgaatttacaaaatatccaactaaaactaactgagcaatcaagttttatttttctcagataacaaggcatcaaaaaggcagttccagaattggcctagtagctgagtcttctcaggctctgggtcagcttctctgaggtccacttttttctcttcttggttccaagacagctgcagcagcttcaggcatcatgttcttatataaaaatgtttaaaagcaggaagtgagagaggaggaagtcttcatgataaacctgtctcttctgaatgaggaaaatctttcccagaagccccggcagattccactgagcaacactgggagatactggccatactgtgctgcacaggagactggaaaattagcatctgatattctcagagtccaaggcaagacacagatgctgccaataacaaggggaattgggtatggctgctgggatgacaaccaatggttgtctgtgccagtcacataaaacaatgtaacaatgtggaaattaagaaatattctcctaaatttagattatttctggatcagaaagaaacaaaaactgagattattgtaagatggtctctttatttcatcattttctgttactttcttctttcactgcctggatgtttggtagacttgaatagcatgtttagtgcatatgagtttatctttcagattttcatgtatatgcatgcattcaaaggctataaaaattcctccagtgtagctttggctttccccttaccctcacatctctttggccacatttcacatctcttggcatgttaaactctcaattcattcttttcattaccatttatggtaattgcatgatttctttgttaagcaaatgataatctggctgtttttttaacttgtaagaaaactataacttttgctcttgataaaattactacactgtggttagaaaatgtggttctggaatgtgttagaaataaaatttctcccaacctttcccagcatttttgacaattatgatctgaacaatttacatccataaaattttctttgatatgaattttcagacttaggataaaggcttacctctgaatgaaggcattgtcactggcattacattcttcaagtctttctccaagagggagaagtaagtcacagtcacaattagcctaggctaatgggctttccccattacttccattcatatggttgcttgccaacataaattctctgatgattagtaaggggtaactgctgatggaaggcttttctacatttattatattcacatgtgtttctctattatgcattctctgaggttgaacggtagttgaatcatgactcaaggtcttctcacattccttatattcatagggctttttctcagtgtgaataacctgatgatgaatcaattgtgagcaatgactaaaagccttcccacattccttacattcatatggcttttcacctgtatgaattctgtaatgtacagtaagatgtgagacccgtttgaaggccctaccacataccttacattggtagggtttctctccagtgtgaattctctgatgttgcttgagttgtgagctcactctaaaggcctttccacatactttgcactcatagggtttctcaccggtatgaattctctgatgtcgtataagagttgagccttgattaaaagccttcccacattccttacattcatagagtttcctgccagtatgaacagtctgatgttgaatcaactgagaacgatgactaaaggttttcccacattccttgcatgcatagggtttttcaccagtatgaattctataatgtactttaagatgtgagatccgattgaaggccttgccacattccttacactgatagggtttctcgcctgtgtgagttcgctgatgttcaatcaactgtgagcttcgactaaaggccttctcacaatctttacattcatacggtttctcaccagtatgaactctctgatgttgtataaaatttgaaccagaattgaaggcctttccacattccttacattcatatggtttcttaccagaatgaatattctcatgttgaattagtcgtgagccatatttaaaggccttcccacattccttacatttatagggtttctcattagtataaattccttgatgattaataaggagttccttttgccagaagtcttttctacatttattatacccaaaaggtttttctctagtatgaattttctgataaaaagtaagggatgcatgctggtcaaaagtgggcatttcttcatgtctgatgatcatctgatggaaatgtctgtctggatttccctgttgtctgtcaaactggtttctgcattcccaatcatcttggaaacttgaacactcaagaccataacttgtaaggctttccattatctcccattggggtgattcgacttcataaacatgctgctttggaaataattccttggtatcatatctggactccaatactaagaatgaaaaaaagcgaatatgtttggcttctttttttttccagataaaggaactaaaataagaactggagggtttagactcaatgcctattaactcttgaatgtagctaagcaattataaaatggacaagtagaacagtgaaaggaaaataacatacatgagatgagggaggcaataagagaggttataaaagtgattctaaaatgttagtgtggggctgggcatggtggctcatgcctgtaatcccagtgctttgggaagccaagaagggagaatcacttgaggccaggagtttgagaccagcttcagcaacacagcaagaccccatgtctacaaaataatttttaaaaattagccagctgcagtggcacatgcctgtagtcccagctgagaaaagaagactgcttaagcccaggagttagaggctgtagagagctatgatcacgccaatgcactccaacttgggtgacagagggagactttaaaaaaaaaaaaaaaagagttggtgtgggtcagaatcactattgaacaatattttttaagacagtaaatgtttctgtgagactctagaaaagacaaatatagagtgacagaaaccaaagcaaatcattggtttgacggactgtgcaggagggagcacaagggaactttttgggttgatggaaatgttcgctatcttgattgaggtgatggttatgtgggtgtataaatttgtcaacactcattaatagcacattttaaaaatgcattttattgaccataaattatgcccccaaaagagtgaattttaaaaagatgatggggatttcaagatgaaaagagttccggagatggacggtgatgatggttgtacaacagtgtgaatgtacttaacactactgaactgtacacttgaaaatggtgagcacggtaaatcttgtattttaccacagttttaaaaaataaaaataaaagtggtgttggaagtgtgtggttggatctgcaacctgcctcagtgcctggaggacatgcaggagaatgaaccagaggaatatgctggtacagtggcagctattctcatgtgtccgctagaagttagaatgacatggctgctgtcttcctctgtgaagctttttatatctgaagtttagctgaacaccatggtgttttttatatctgaagtttagttgaacgccatggctgaagcccattatcaactgaatgacatttcttaaatttcttaaatgtcatgcatttacctgaaccttttcatttcttaaaggtgaccttggaaaaagaagggcttttttccttgtttagaggattaggccagttgattgagggtgggtccttctagagcaacatactttgctgattattcaaactgcatgaaaaagctgaatgctataatggactgtgattctacctggtacattatttcagctacagtggcaggttttactgtacttatagcaaccaaccccagttgacttaaagagactcagatatagcttgactacaggtgggcaccaccatgctcagctaatttttgtgcttttttgtaaagatggggtttcgccat[138 bp omitted]tgctgaatcatacatcatagattcaaggtgatgtgctaacaaggatatcatttttaaatgttgccatgaagttcaaatgcaccttttcatactttaaattgatatatgtatataacccttaaacgtttatgttcatgataattctgttgagacttctggctaaggatgttgctatactggtatataaaatgtgcacaattaaactccagtgtgatactactcatttcagtatatatgagtgctgtattttgtgcagtagctttatcttaatatggctctttgtgaatgcactttatagcatttattgagggtgaaagagcaggagggaattctatgttacgtatttctataaaaacattggtcatttattcaacagaaccagtattcctaacatttgtctgggttttagatatgttgttctgcagatctattcactgtagtgatcccaacattattgaaaattaccaagcttttactgctctcaccagtgaaaaactgtaccttcttaaattctgtcagcatgtcacatttattgtaatcaacagtaactggatgtttctgaggtgttttgattggactcaaaagtattacaatcagtttggagacaaaaacacaatctgcattttagtttaagtatgacactgatgacttaaaaaaaaactatatacaaacgttctatataaagtttgcctccaaagtatttctctttctctttcttttttgcaggggagatggggtctcattctgttgcccaggctggagtgcagaggcacaatcatattatactacaacctcaaactcctaggctcaggtgattctcctctgtcagccttctgagtagctgggactacaggcatgagttattacgcctggctgcagagggattttaatatgtaaaagtattaacacagtgtattaactttgtgcccacgcaaatctcttttctatcacatccttatgttcttcgacagattgacttttatgcttctccttttagaaacataaaattgttttattcttagttttaaaaaacatttgaatgtgtacccttgcttatgcgaagatttatgacctactagtcatagctaaatagtcaacattgtaagagctgatactttttggttcatgtgaggtttggcattcttgcatttatgtacacggatgtcaattgtgtggacttcttctgtatttatgttaactagcttttactgaattgttgaaactaaaaaagttaaaaacgtgcttataaaaaaaggggggggggattatgtccaaagaacccaggagccagtttgaaagggtgtcactgggcaagtctggaaaactatgaacgttgtgataaataatgataatgggtaataatctgttacaggataaaacaagatttattttattctgacctggaaatgagaaaaaatatgccacctactattaatccatatgatataaatgaagaaacaaatggtgaaagggagaaagctcttctttacaggagtatgtgatctaataaataagaataaagtttttttaaaaatcactattttgtaactattaatcatatctgatccaagagaaaactatcaatgacttctgaaactagcaggtgaataatttgtgagaagcacaatatttatatcctctccaggtggaccataaaatcatggcttgcctctatttctacagtgctttccctctgcccacagtgcagaacccaaacttcataacgtggttgcctttcctagcgtatctttttttttctttttgagacagagtctctctctgttgccccagctggagcgcagtggttcgatctcggatcactgcaatctccgcctcccgtgttcaagcgattctcctgcttcagcctcccaagtagctgggattataggcacgtgccaccacacccggctaatttttgtgattttagtcgggacgaggtttcaccatgttggccagactggtcaagtgatttggccgcctcagcctcccaaagtgctgggattataagcatgagccaccatgcccggcccctagtgtatctctgtgttcctccctttgctcactgacctcagccacaagggccatccattatctcagaggtaccaagggctccctgctcaggtccttcacactcattggctacaactggtattccccagctacatcacaccttccatgtctcagctgaaatgccttatccttgaagaggccattggccctaccatgcaccctgactgaacctgttctttttctttcacatattagctcatgtccagtgtgtatgatttcatgtctattttcccactgcagtgtaagttccatgaaagcaaggataatgtccacctgcctcatcaatgtatactgtggcatattccatggtgcataataaaagcttaataagtacttgttaactgactccagaattcaaacaaaccgatacaaattcctttagaaaaatggtcaaaggacaagatcatgtcctttgcagggacatggatggagctggaagccattatcctaagcaaactaacacaggaacggaaaaccaaatactgcatgttctcacttataagtgggagctaaatgaggacacatggacacacagagcgggacaacacacatgggcctttcagagaatggaaggttgggcggagggagagaatcaggaacagtaactaatgagtactaggcttaatacctgggtgatgaaataatctgtaaacaaacccccatgacacaagtttacctatttaacaaacctgcacttatactcctgaagttaaaaaaaattttaaatattaaaattaaaattaataaaaaaagaaaaatggtcaaaagatacagacatctttccaaagacaaaatactttccttaggaaccaccatatttgtactcagtctagccctataatccaggttgaatttttaaagtgtttcaggaggaaggagcagccacctttgtcaaatgctgctgacgagctgaggaaaacaacacgtaagacataagctttgaaggtagcaacctgcagggaagatcttctaagacaaagggccacttccagcggacctgatacctgcagtggctgctcccttcccaatgatacctcactcacctggacacaggcctccagacaccactctctccaccatccagggctctttgccttgctctaggaaggagatcacatcaggtttggaaacggcaagacctggagatgagaagaaacatgccacctggttatggtgtgggggccccagaattcagatccaggacctggtcatcaagcaggagaggcagttgcaggaagtgccagaggaagatgggacagttgcctgggggtagggggatgcagcttcagccgacagcgccgccctttaacccctcaaaaatgaccaaccaatcataagactgaaaagcacccaaaaactgaccaggaaggaacatgcccaaggataacctccaaactaacagacgagatcaccttacccagtgagaccaggttgctgtaggtctccaacatcacgtctctgtacaaatccctctgagcaggtgccaaccactgccattcttcttgggagaagactatggccacatccctgaacaattctgacccctggaatgacaggcatgtatgatatatatgtatttcaatggttcacagtgggatgaaaggagatggggcaggtctttgcgggagggggggttgttttgttgaacaagaagggtgggactgaatgtgaaaggtgacagaagaaatggggatgagtaaaacagaatgatcaaattgttctcaaacattccttttaactgcaaatcaatgctctgtgtacaggtctgggatgaaaattaaaatcaagctaaatggagttttccttattgttaagaaacagtgtaataaagcacactgcccactctatacttggcatacaataaattctcaaggtgagacctatcacttctatcttttggaataacaataacaacaaaaaatatttctgatggattttccccaaatattttattttttaaaattatggaaacatgttttctatcttagatacaggattttcatgtaagtcaagaatttcttggagatgaaagttcatcattatgttggaacataacacaagcatttttcttcatgggaaaaaccatggagataacttttattgagtgcacaattttctatcaagtgaaacaactgactcaaacatcctcttattttggatcccgaggttggatcagatctctaaggcttttccaagccctgaccactcacccacctagatgatcatctcacttgctacatcgctcaccatcctcagctctgtacttttcttcctcttaagctaaagaaactaatggaggatgtcccagattcaaatgctctgtccaacgtcaaactagactttaattctggcatcaaatttttgatggattcccagccaaacctcaattacatatccaatcattaatcattcccaaagcaggacactgtaccatgcgctgaaactgaaaccaaccaacaccacctcccctgcttttctatatgtgattgctcctaagcattcattccatctcttcaaacttcagttcttacaaaggatgctctcatttcatacagggaaatgagtttctcctcctagcagacgaaaaccatcaggagatgcagaatgctatagagaataaatctgtgggcatttgtcagaggggagaggacaatgggagaggagactcctgcctggtccttttattccctaaaatgggaaagtctgagaaccaaatttctggatggaacccaggtggaaagtttcaagataaggaaagcaaatatttatgggatttaaaaactcacaagggacatgacttttagaatttcaagggctgataggtcctccttctggttcctctcttggggaagggcagagtcctgcgacggtagagctgggggaggaaagagcaaacatgagaggctaggcttgcctcacagttcctagaatgccaagttacaagtccccacctgcttgccctctgcccaccaagaaaatgagaaggagggggaggcaaagggatcctcacccaaccccaggaaaccagctttagctgctgcaaggcaaaggggaaccagtggtcctttccctcccatttcccctaaacatccagtggttctgttttgctgcaaatgcaagtctaagacagggatgctgagggctgttctagtgactgagacccacatgttacctcaaggacaaggagggcttccctcaagccagggagcatagaaggcctgcatcatttgcatagccccagcctagaataaagcctttccaggactaggccatttaactctctcctgcagcaaatataacacctttgaaagtctacctggctcttttcccaaccgccaaatatacaaaaagctctacagcccaaactgaggctttgtgcatgccacttcatggagcatgccttgcatcaacaaatgggatagagttggaaggaacagtaagagacaaattacacacagcacgcccagtgctccattatcagcacataaatgtgtccttccatagagacacagcagtgcacaaagctgcatgtccaataatatttgctaaataggagaactgaaaattagtacgtaagtaggcaagtccacaagtagccaagaggttgaatcatttttggcacagccatataatgggatgccaagtgactatcaaaaatgactatcaaaaactgacaagcaaagatattaactactgaatcctttgagaacattcagcaaaaagaagtcaaactcactaacacacaggctaaaaacaaaacaaaacaaaaaaattggaagaaaaaacacccaagtattcgcagtgttgtcatttaaccagttcttgagctcactgttaaacaagaagtactctgtaaaggagtatataaggtgcctactgcattacaaacatttggttctaagtaacgtgtaagtgaaataattatgaatgttgcttaatatgatgtaataggcagcttttccttattatgaccacttttataagcattatttgtattaactgcacgatatcctatttacaaaggatggcctgtgatccactcaagtgtttccccattgctggacatagaatttgaacatataaaatgttcccaagtataagtttttctaaactagcggttctaagtcttctggggtcttgtaactctctgagaacctcatgaaacaagatttcctctcagattaaaaaaaaaaaaaggcacgcataacagtgaatgcaaaacatccgcaatttcagggggtcggagacccctgcgcacccacctaaggggtccatgcacctgggctatgaggctggaagcagaaagggggcgccagaaagcgcacgccgcgagggccggcgggaaatgtagtctcacgccggtaaagccacagagcgacgatgaggcgagacgtctgcgttcttctcaggcctgagacccaaccggcccgggcaccagctcctgctggaccccagagcgcctggaaagctccggaacctctcacctgccgcctcctcgggtccaagtgccaccgcggccgcgcccccggcagcccagggcgcgcttccaccacggtaccggtggattcgccgtgcgcagccggaagatggcgcagacgcacaaagcacaccgatgctgcgccatgatagggccggcgccgcagtgtcttccgggaaacatagtctttaggcgtaaaggcagcagcccggccttgaagccggatctcgcgatgtttcagggtgagccggacgcaggcgtgcctgcgcagtgcgcggaggagtgctgttcgtgtgttcgagtccctgggttgcttcctggggtctgtggtgctgggtgtgctatctgcgtgtgattctctagcgagagattgtgggcgagtgaccgagtgggcaaggggccgtcactgtgtgtgcgtgattttgacagtgtgtggtggtagcttctgactccgcgtgggtcgttgaatgtatgactgggaccgtttagcggtggatacacaactgtgtgcggctgtggaagattgcctcatccgttacgttcccatttccgtggaacaacagttttaccagaaggtttcgaaggaaccttaaagtttggaagcgtaagagtttatctggtaactaattttaaacattacatctatggtgagttaaatgtgggttatgaaggagaacgcaaaataaaaacgttataaagatgtaaaggagttttatggggcggcatctcttgggcaaatatcagaccgccgtaggtagttgttaattctctcttgtttttaggcggctttggtgtcatcaaatgtgagaagccctggactttacacatcccgagccagtgtgatccagtatgattgggagtccgagtgccagatgccggtcaggacctgttatgctgggtctcagaatgcggaaactctccctgtccgaggtggaacagtttgtccttgagtgaggactggagtcctgagtgactcttttgatttgatcctgtttccctcaaacctggtgagctctatggtgtaataaatggttaagagtgtgaacccttaaccatctctaagactggagccagaatgcctgaactccagtcttagagatgtgcctcggtctccacatttgaaagtgaggatgattgtggcatctaattcattgagttgttggggaggagtaactgatatgtaaaataatgctactgctgctggataaggatgctaatatgactgaagctaatgctttctttctgcaaagatgctttttccaaaacacaccatattgcctctttacacattcttcaggagagggtagaggctgcattttccttgtaggtgcggtgatgtggtggaaagcacacttttagaattagacagatgtggattcaaatagcatttcagccatttattagtttcttcgtgcctatctcggttttgttttgtttttttttttttgtccataaaaggaagaatgtaatgctgggcttgcagctttgtcctgagggtcaaataaaatgatttaataatataagcaaagctcagaggttggttattgctgattactgatattaaaagacaacttcagcaaggatggttgaatttcacacttgtgagcggacagttgaggagacagttgtagatttatcctacttgaccttatttgtggttcaagacagtgttgcgagttcaagaggagagggtagatgcaaaaagtcatcatctttcctatgttctctgatcttgggaaggggcgagtggctctagtttccctttaacatcccactgtgttgagtgtgtctatatgtacatgcgtcagtatttgcttatggaggaaaggaaggaaaaagaccaaacaggtacaaagccagccatctctcaggctaactttcttctataccatttttactttctcacattcattaatctgccaaagagaaatttagaggatgatgaaatggccacttctgactctgaaccaagcctctgaagtcatacaccattatactcttggtcacaaaatcagctgtgagtctaagtaggtggaggctacacaagagtataagtactaggaggcagggatcattcagggtcgtcttagagggtggcttccagtttcttccttttaagagtatgagaatgctctgagctagcctctccattccatggaatccataggtcttttgtcagccacttcccagtacacattcctgtgccaaagcacatgcagagtttgtagggtccagccccacagggtcggttggtttctccccgtgtgcggagacgagagattgtagaaataaagacgcaagacagagataaaagaaaagacagctgggcccaggggaccactaccaccaagacgcggagactggtagtggccccgaatgccaggctgcgctgatatttattggatacaagacaaaggggcaggataaggagtgtgagccatctccaatgataggtaaggccacatgggtcacatgtccactggacagggggccctttcctgcctggcagccgaggcagagagagagaggagaaagagagagagagcttacaccattatttctacttattagagacttagtactttcactggtttgctactgctaactaaacggcagagccaggtgtacaggatggaacatgaaggtggactaggagcgtgaccactgaagcacagcatcacagggagacggttaggcctccggataactgcaggtgggcctgaggccctccacaagtggtggaggagtagagtcttctctaaactcccccggggaaagggagactccctttcccggtccgctacgtagcaggtgtttttccttgacactaacactactgctagaccacggtccgcttggcaacgggcatcttcccagatgctggcatcaccgctagaccaaggagccctctggtggccctgtctgggcataacagaaggctcgcactcttgtcttctggtcacttctcactatgtctcctcagctcctatctctatatggcctggcttttcccaggttatgattatagagtgaggattattataatttggaataaagagtaattgctaccaactaatgattaatgatattcatatataatcatatctaagatctatatctggtataactattcttgttttatattttattatactggaacagctcgtgtcctcggtctcttgccttggcacctgggtggcttgccgcccacagagttactccagcagctccctctcctgttatccccagccatatccgtgcttctgccagattccttctgtttcaggatcacccattatcacttgaatgagatcaactgtggggaggtgggccatattctgttgtgcatagtaatccaagcaaggaatcacacaacaaagtgggttctaacccaatcttagctacttactccctgagtgaccttgggcacctcccccaatttttctgacctaaaatctgtgcattataataataataaatttccacggaggaagtataaccttttcaacaaacagtgctggagcaactggacatccatagccaaaaaagaaaaaggataaaaggcttttctgcagtactaatccaggagaaaaataaatgtattgcatcttccttgtgacaactgaggacaaaatacatgtggcctctctctgaggacttttttttttaagagacaaggtctcactctgtcacccaagctggtgtgcagtggtgttcctggactgaactgaaggtcaggctgcttattctcgcagccctataacaagatgctgatgaactgtgaaagaagagagttttatttctgtaaccgggtacagggagagggccagaaaaatattgccagaccaactcaaaattacaaagttttccagtgcttatctaccttctaagctatatgtctacatgttagtgtgcattcatctaaagacacaagtgattaatttcttctaatctataactaaggtctgagttatagaccttggggacattcctctggagcctcagtgattttacttactctagatgggtccaagtgccaaaggtaattaccttatcttgtctcctactaagttatggaggtctggagagttcctttagacccccaataaaacttgtttaatcctaaatggatcctggtatgaggagtgtgaccattccttcattattttgtcatgcttcaaatcatcagcctttgtgttagggcgctggctctctcagcctttaatatttaacctaaccatttagtcaatgctagaacagttcttatggaggcctgcctgttcagtttttgtgagatctggcttgccacagtggcacaaacggcttactgcagcctcaacttcctgggcttaagcgatcctcctacctcagcctcccaagtagctgagaacacaggtgcgtaccaccacaccagctaatttttcttttctttttttttttctgtagagatgggagcctcactgtattgcccaggctggtcttgaactccggagctcaagtgatcgtcttgcttcagccttgcaaaatgatggtgaagctgcatcattgtctggggtaaatacctgaggttcgttgtctcacgccaagggaatcaaggacgtggacacacaagaagtgagtttaagagcggaggtttaataggcgaaagagaaaagagaatagctctagctcctgcagagagaaaagggctcccaagtaggacttccagtccgtggcgaagggcacggggtttatagactggcttcaggaggtggtgtctgatttacgtaggccccaaagattggttggaccaggtgtgccaatcagaagctggctgccccaccctaatcttttattatgcagatggagtccctgtctgaccgggccatgttgtatgttccttgctgtacacgtggttgacaaagaaaagggaagatggagctgcgatgttggacatgcctggcccccaggtagctttttcctattggcacagctgctggcattcacccgtgcaaacttccagcttgcttatctatgtctgcagcttgatttttcaggctgctgtttgttagaaaagaaatgacttgggggctgcttttcattaaaaggaaaaccttaccggggatttccttaccctcactatctgcctaaataatttctttttaactcctatgtcacttgggattacaggcatgagccgctgtgcctgctagagggttttttatctttattcctcaagattttgcatttagataattatgttaaacttgggtgtgctaggtagacatacgtctgctgattacctgtttaggaagaatgtggattcgtacgtagggaaaaggagtcaggctggtgggaccaggggaaagcaaagagataaagcaaataagctatagatctgcattttcttcatggtccaggatatataaacaaaaaaaggaagcagataagctataggcttgcttttctttatgacccaggacatacagccctgccgagcaaataatgaacgtaactcacaaacttcctgcttatcatcaaacgcacgcatccacttatcatcaaacacctcgggtgacagaagaatgcaggtcagctccctgctgccttggcattatcaatcagcccaggaaccatcctataaaatctccagcaagcctttgtttccttgcagtcagctcctcttccactgattctgcctgttgctccctgataacatactttgatactgtctttaataaatctgcctttcttcacccacagctgtcttggtaagttcttttacctctgtgccaccagcccaaacagttgctgctcacctgaaacaaagaataaatgtggtttttaagcaaatcaaagtttacttagtgactcttaccaagctttgtagaaggttgtgccaaaaggagaagcttaagagataacggctaaaaataaaaaatgttaccaccgcccaaggggttcttcctgcccactgcataaagaaagaccatggcattgtagtagagaaagaggttaatagacatgaggctggccacgccacatgggaaatggagttcgtactcaaatcatctaatccaaagctcttatcttagaggtttttcaaagtcactttgggggaaggggtgggagtggccagataacaggtgcttgctgctgattcgttgggctggagatgaaatcatagggggtcaaagctctccttgtgtggggtgaattgcttctgggtggtgccacaggaactgggttggttagtccaagtggaaccatcaggtccaggtggagccatgggtgtcagacatgaaaaaacctgaaaagatatctcaaaaggccaatctgaggttctacagtagtgatgtcatttgtagtagtaattgggaaagttgcatatcctataacctttggaataatggctgacagttgaataatgctgccaccttagcaggacccagactcctctcctcccagactgatggcctcccattagctttacaaaaacaattgagttttgggcaaagcctgttatttaaactatagcgtaaatgtcttccaaagttagctcagccctatagcccaggaataattaagggaaaggcaagataggtgggttagctcagtttactataataatttttctcactgatacagtttttgcaaaggtggtttcataaagatgcctactctcttcacacatttgtgaaatgtcgaaaagactgcaaaaacctggacgtttactgatgccttattttaaacaaggcttgtctggtttgaaaaagtgaggggaagctatcaatcataattttgttaaatacagtgagttctaagtttctcctcaaagaatctgtgtcagtatgttcagttctttgttttccattttaaagtttaacttcctcattctcttcatctccttgcccctagtttcagtaaacaacctccctgccagttctgatcagtagttcacatctgttctcctggtcacttgctccatcctgagacccctggtcacccgctctaacctaagtcacctttagtcacctattccgtaaccgtctttcctgccacaactgctcaccccaccactgtagctcttaacccctgctgtctttaaaatagccaatcggaattagcttagactgtgcagtccaaccctagccaataggggaacgatgcaacagtaggggctacctgtgtcagggataagaaccccttcccctcccttgttcaggtgtgctctcaccattgttccatccacaagatgcacccttctgtagaagtaaaattgccttgctgagaaaatttctgttcgaatgctatttcttttgtggcaccgaaaatttatttctaacaatttcaacactcaaacacaacccaactacaatttttgtggattatgttccttttactttttaggaacagttttccaatgttgcagtcataatgcaattttatcagctttgttcctcctttaagaaaccttaatacaagaagtatttttacatgttgcttcattgccatgcaattattcgtttaaaaagttgtatagttttcaatcagatagatgtgaaagg[155 bp omitted]attaagtgggtgtggtggtgtgcacctgtaataccagctactctactcgggaggctgaggcaggagaatagcttgaacccgggaggcgga[131 bp omitted]tgtcaggcaaggctgcctctcatttgattcctaaatacaatagctataaagattaaaagctacatacctccctcacaatttgcccacaaggaaattccttttggacaaaggacagaaagaattcaaagtcatccctctgaggctcacctgagagaaatgcatatctgattgcttccttggacctagtgtttatgtaaaaatgcaaattcacagagccagactaaattgtgtattcagtggaaagctaatcaataactcaaaagaatgcaaccttttgtcccacatctatttatgacctggaagcctccacctcagatttttccaccttacctgactgaaccactgtacatcttacacatagtgattgatgtctcatatctccctaagatgtataaaagcaagctgtaccccaaccaccttgggcacatgtcatcagaacgtcctgagactgtcagtgcttccctaaccatgggaaaataaactttccaaatcgattgagacctgtctccaataccttttggtttacaacatactgttatttatttgaccattcttctacttgtagctgtggagtcctgataagtaagcaacaatgaggaaggggccccagtggggaagtacaatgaacagttgtcctgagaaatggctaatcaaacaacagctctctccaggatgaccctataaaacttccttccagctcctgcctctttgcagacagctccttctctcctgtgctgccagttgcaaccttgcaatgtattttcatacgttctctaataaatctgcctttctttaggactgtcctggtaaatatgagactgttttctttaccgcctttgatacaagccctatctagttgctacccatgacagtaggtatattgtttatgttcaacattttattataaacaatgtttcagctgggctcggtggctcatgcctgtaatcccagcactttgggaggc[135 bp omitted]gaggcaggagaatggcatgaacctgggaggtggagcttgcagtgagctgagattgcgccactgcactccagcctgggtgacagagcaagactccgtctcaaaaaaaagtttcagttagtattttttgctgatatcatagttgcgtttgtttaatttcctcaaataaaattcccagcttatatgatgctctttgtcactggcaactttggtcagacaattaaatgaagcaattgaagggcacaacaggattttggaagggatggtacaggattgggagataaactagagataggagtttataaaatattttcaaagacagattgaagaataggaataagagtatgatattgtgaaatatatatttgatcttcctagcatagaacttctaaaatccttagaaactacaaagtaacagtaaaaactcattttgtatgctaatgagttgacagctggcaacccctatagagtttcaggatggggactggttatggaaagaccaagacatgactagaaggttgggacattcaaccccacccccaaccctaaggaggggacgggattttaatcaaccatgcctatgtaatgaagcctctgtaaaactcccaaaagacagggtttagagagcttccacccagctgaacatgtggaggttactggaaggtgcaacacccttttttctgtactttgccctacgcatctcttcatctatatcatttgtaatatcctttataataaactagtaaacataagtgtttcctgagttccgtgagccactctagcaaaatatcgaaccgcaaagagggggtggtgaaaatcccaatttgaaggtggtggagtcagatgttccagaggctagactttagtgggaagtgggaagggggaggcaggcttggggactgagccctcagcgaatggtgtctgacccatctccaagtagacggcgtcggaattaaactggaggacacccagctggtgcccgctgcagaactcactgaactcattgcttgcttgagatgtgtgggaaactcccctatatttggtcagaaaagtcttctgttatgattagttgtcgttgagataatagaaaaaaatgcaccttgcgttttttccactgattcagagggcataactgaaagaatgaagaactgaaagaatgatcttaatactctgcttcgcttttcttgataatacgcattacttcccaatatgcatcagtgtcctttattattaattttttcctattgaattcctcccgcattagaatgctgctccatgaggtggggattttgtctgcttgttcactgctgtgtgcccagggcccacgacagtgcccgatacagcaggcgctcaataagtggcgaatgaaagacagggcaaggcggagagagaagaaacagaaagggaaagagaaagcccgggccgccagagcgcttaatcacacgtacatcctaccgggcccctctccagctggctcaggctccacactggtcctccagctcccttttctcagcgatggactcacagccccacccggagcgctggagcgcggacgcggtcactgcgcgtgcgcctcaccgcgctggcaccccggcctggcagcctttggggacctgaaccagctgcgcctgcgcaggtggaacgggtggaacgggtgggggagcggacagtcgaacggcctgagagggctcagctggtccgggtgggattctgaaggccagcggaggtgggcttactagggaaaggggcgcagcagtaactacccgcaactgagcggcgggatctgcggccgcccggggccctcggccaacatcccagcatcctctgcgccgcgccggccccggactccatttcccagcggcccctgcggcctgccctagggctgcggcgcctttgtgagcgcggccgccggccaggatcgagccctggcccgggccctggcccagccccggcctccaaggaccgcgccgaaggaggtgcccactggagggaggaggcggtgaggagcgcgggatggagctgacgccgggagcggccatgccaccatgtgtgggaccgtgtgtgacagtgtgtgagaatgtgtgagacattaaggaaccgtgtgtgacaatgtgtttgacagtgtggaatcgtgtgtgagaccatgtgtgactgtgtgagaatttgagaccgtgtgtgacagtgtgagaatgtgaggccgtgtgtgaatatgtgtgtcagtgtgagaccatgtgggacaaatgtgggactatgtgtgacagtatgagactgggtgtgagaatgtgtgcgacagtatgagaccgttgccccggtgtatgcgggagcctttgacagtatatgggaccgtgtgggactgtgtgacactgtatgtgcttaagaccacgtcaccatgtgtgagactgggaatgtgtgacagtgttaaactgtcattatgtgtagaccacgtgtgaacagtgtgtaagaccatgtcactgtgtgtgtgacctgtgtgtgtgggataatgtaagactgtgtgacagtgtgtgtgactttgtgaacagagcttgaccgtgtgtgtaggattagatgagactgtgacagtatgtgagaccatgtcaccgtgtgtgaggctatgtgtggttgtgtacggtgtgtggctgttgatatgggaccacatgaaactgcgacagaatttgtgtgacagtgtgtgagactgtgtcactgtatgtgaaactgtatgtgaacagagtttttgttgttggactaagattgtatgtgacagtgtttgagattgtgcatgacagtgtgtgtgattatgtgagactgagggagatggtgtgacttagcactgtatgtcatcccgacagtgagtgtgacagtgtgactgagaatggccttatatgacccattgtgagagcagggcgggctacaatgtgggggcatgtccataggttgccaggggaggtgccagaatgagaaactatgtggtttgttgtctgtgatttgtgtgggcaggaagctgtgtgggtgcttggagatgctggtgtgctctggggtttgggagactgctgttgtggtggagagacagaaagattgagataaaggggaaaagatggagaaagggagggacgagagctgaaaagggagagacagacaggagcctcagccttaagcctgaaaagctgaccacgctggctgcttgtcctctggcacagtagtttttccatccctctcagtctctgggggcacgtgaggaatttaaaaggaaaaaggaatgggagacctaccatgtgctggttatgaaaataaatgacagaaagatgaaaattaagcactgtgctcaatgctttatgtagatcatttcagaatcctcccaacaattgatagggaatagttaccatttcactgatagagaaacaggtttgcagtggttacctaacttgccagaggttgtataggtagcatgtggtggtttggctgtttgagaccaggtgttctgatccttaagcctagtagttcttaccactgagttatgccacttcataggtaatggctttattcttcaaggcagtgaggtctgctggacaagaattcaccatagggggtttggatgactgttcaagcatagcctgctcctccctccctctctccttctttctgtctgaggagattgcccagaaaagtcaagagattagttttcagttgtgggttgtcataagccaggaccagaagtaggccgtcttgactctttgatcgagtgtccaccacactacatggaccctctgatactcactctgtgtatagagatgctttctctgagaaatttcactttgtagctttatctgtcatccttgcagaaagggtgggaacatatttcctttcaacatcatgatcgggtggaaagaattaaaagttagaactggtttccagtttggcttaattattaccatgatgccttgaataattactccgatgaagagccttcatgtgtgaaagagggggaaatccttgcttggtaataccattctgtaattgctgtttttgtttt[140 bp omitted]ctcctgggttcacgccattctcctgcctcctcagtagctgggactacaggcgcccgccaccacacctggctaattttgtgtattttttagtagagacggggtt[145 bp omitted]attgtaaatttagatataaatgaattgctcagtgatacctctaatttactcctgaggttggggaaagaaggagaaagagaaggaaaggtttctaggctgatgatactgagagctgcagggcaggcctggcattttatggtttcttttccttctccagctcgactttctcaggatactgtccctctcccacagaggagctgaaggagtaggacagaagaactgtcaaattctggaatccttaaagccatgtccaaggtaaggaagcatttcttctctcttccctaaaatgccatcttattttttaggttatacgaacattttgtttttcttccaaaattctgcaacctaataaggttccattcatccagtgactcgttcctcatatcttgctttccagtaaaagtctccaaaagcctagttatctttttttccacagccagcatttttatcttcactcaagaaatagttcagcaccttctctgggtttagtgtctgttagaagctttcaagatgcaaaaatacactcattggcatatgtaaaccttcattgtagtaagttgattgagactgaggtgtatgttcagatgtaaccactagcataaataaagcttttccatagacctaggtttgaaaagaaggcaagacaggagggttatcaggtggtcttagtcacagaacagggcaaagtctcttgctcaaagtgatcttgaggagtgagatgtgttgagtcttgaatattaaagtgtgggtcagctagggcagggatttttccaggcactccgtgggctttgaagaacagtattccagggaataatgaggtaccattttagggacattctgagtgtccacagctatgttattctaggtcatccagttaagattagtggaattaatatgtaaaaaatagcagaactttgttttggaaaagactaatgggagagcacttgaatctgcattaaaataaaagctgtatatgtctataataatgaaaacagttgatagtgtggaatggagccagaagaaacatacaatgttaagaaacaaatccaagtataagaattccataagaatggaaatcttcattcactgaacatatagttattaaaggccttgtgctaattgctgtgataaataaaaataaataaaaataaacaccttgtgccaagtgctgtgataaataggccctgtctttgtcttcatagaatttaatgtatactagtttattatatgatgtactgatattattttaaatcagtgggaaagggatggattattcatctagtaaaaaaaattctctgcacttagagaaaaatacatagaggttaaatgcattgtataggttaaatatatatatatacacacacacacctctaggttaaaatatggaaaatggagaaagagtaaggtgaggcagatgcagaaatcaactagtacagcactgtccaatagaactttctgtgatgattgacaatagaaatgttctatatctgcagtgtttaacatagtagccactagccagatgtggctacaaagacttgtatatactagcatgactgagaaactgaatttttcatgttaattgatttaaatttagccgtatgtagctagtagctagtgtattagacagcacagtcttaggcttataaaacagtaaagccaggaagataattatgggtgatcttgtccaagtttctcattctacagatgaagaaaaagaggccaggggaagaaagtgacatgtccacgtaaccagttagtgactgagtcagatgtaagaagttgtaataaaaattgagggtcagtaatgtcgatgatgatgagtgatgatatgaaaagggtggtagaaaatgatgagggacactgtagcgagtctgtgatggggctcattatttcactcccatgcccagaaccttcattgccttcctatcttacttggaatgaaatccagtgtcctaaccatggcctataaggccctttgtgcttcaggtcctggctttcctagacctcattttctacaagtatttacctctcttcattttaatcacagttgtgaatttgctgtccctcagacttactgtgctttttcttgtctctggacttttgcatttgcccccccatccccctacatgttgacatagcttgctcccccatttcatttagattgttgttcaaaccttacctcttcatttagacttaccttgactatattatctacaataaacagcctatcactcttaatcaccctttaccttcttttgttttttgtggcatatgtcactacctgacatgtatgaccttatgtttaatgtttttctcctttgttagaatattaagaggaggaactttgttttgttcacctttgtattcctgactcttagaatagtgcctggttggtaataggcattcagatgaattccttatctgtgagtgagaccaggatagctagagttagccacctcttctttcctgctactgatttggtaacagaagaaagaaaaagctgaaagtatgatgtgtagaataggtggaacccattagcccaaatgctgtttccaggaccccaccccagacctcctgaatcatggtctcttggtggcacctaagaaaacacatttttattgggtttcccaggatgatgattatctttttttgagatggggtctcactattttgcccaggctggttttgaacttctggcctccagctgtcttcctgcctcagcctcccaagtagccaagtagctgggttacaggtatccaggatgattttaatgcatggtttttgagaacctctgcctttaaagattatatttaaagtatgcctcttgtaagcagcatataactggctagttttaaaaaagctagcctgataatcttaatcttttagtgtttattacatatttaatgtaatacttatacgtacgtgcttaaagctactgtgtttctgtttgttttccatttatcccatctgttcttttttcctttgtttctccttttttgcttttttttggttaagtcaggtatttttccttattattttagtaattatacataatttttattgttcttttagtggcttttctaagataatattcatccattactcatatgtagtaatccttctttcttctgtaatcttcctcctatgattagtacccttatcacttcctgaacaggataagatgcctatggtgatttaactccacaatattcttattgctctatttgtaattactgctttagaactcttaatttcttcctgtgttttcatgcttccattttccttctgtattactaatacctgaagaactcttcgagtatgtcttcgagtgcaagccaacactttactcccaccctgaattgttttttcaattcaaaaacaatttgaccgtatcgttgctgggtcaaaatagtgtaattaaaaatttttttgaggttaagtaattttgtgaaatcctggtctcaatggagagaatgacgtctgtgaatcgattttaagaaaataattca[133 bp omitted]ccaacatggtgaaaccccatctctactaaaaatacaaaaaaattagctgagcgtggtggtgggcccctgtaatcccagctacttgggaagctgaggcaggagaattgcttgaacatgggaggtggaggttgctgtgagccaagatcgcaccactgctctccagcctgggcgacagagcaagactccatgtcaaaaacacaaacagcaacaacaacaaaaattaagatttacccaactgaaaataagcatgggggttagtaaataagatagggcataattatactgtataatagtactcagccaataaaagtgacattatcagtaagtgaaatatatacataatcatagacattagtataaggaaccgtttgagcagattatactaactataaattataattgcttttaggaggtagggtgacatgggagtaggcatgggggtgaaagacttccaattctttaacttaaaaagggaaaaaattggctgggtgaggtggctcacccctgtaatcaatcccagcatcctagcactttgggaggcccaggcaggaggatcccttcagcccaggagtttgagaccagcctgggcaacatagtgagacatcatctgtaccaaaaaaaaaaaaaaaattacctgtgcctggtgatgagtgcctgtggtcccagctgcttgagaggctgaggttgggaggatcattcaagcctgacaggttgagactgcaatcagccatgattgtgacactgtactccagccttggcgacagagcaagatccggtctcccaaaaaataaaattaaaacaaaggagtggggggaaatcactgagggtagaaatactggaaagtatattttaagtttctttaatgatggcaatattttaaattaaatcaaagtaaatataaaaaaatgtacaaggtattcatggtctcattggctgacaggaaaatgtcagatagttaaaacacagactctattagttcatgtgtgcagctaaaaaatgtctcaaggacttcatgtagcaaaagctgcttcgctaatgtctacagaataaatgatgtgtgtggaacactttcccgcacaaaattttaaagagtttgtattgaagtatttgagttacagtagaattgatgattagcagcgcccaggcctatccagcacgagttttaatttttagacctgattcacattcttttccttctttgaagctacaagtcacttcctcagatttccttgtattaagaaatgtttcagagatagaagctttttaagcagctgatgcgtgtaattgatatttcttggagccatacttttgcttcctttatagataacctccttaacatttttgtgcatttttccggcagtagcaattaacattgactcatttttttttccattaaaaaggtttctaaataaaatcactgatgtatttgagtatttcttcaataggagcattactctgcaaagagtcatataagagtaggggtgatgttcatatttgacaaccaacaaggcaaaggcacacagcagaacttatcctagctgggatcctggagtttgctgccatgctgggcattaatcttcagttgctgaattccttatggagaaatctggtgtggtcactagcagcactcagtgaagtagctgtttatcaatgagtgtggcagtatttcagtatttaagaaatcagtatgttcaggtgtgtaccattgaatgccatctctatgtcagcccagcttaagagcaggctctgtgacatgtcaaaaccaagatgcatatgcctaaccatacaacaagccctgataagtcttgagctgatttatcttgttaggaagaagacccatttttaatttttagggagcaaactaggtcttgttccgtgttatcttaaagatccttaattcaacattcggtagtattatttgggagctgtactgtaacatttttaaaactctcttgctcatcaaacaggcacaattgtgtatgtttctctagtgagagctgtagatattttttgatgcattttattatcagacttggagacattcactaagtaaattaatagtgcttaaattactattattttgtctcatgtagcatgattataagttaccaactatctttacaacttagtggggttatcaagagctgttaggcaatcatttgtcgcctcttacacacagtctcaggaaaatttttatttccaatgaacatttgtcccatattgaagtaacttttattgtacttctttgattccttcttatcaagtactgattatacagattcaaacatttattgtaatatcactcttcttcttctcaagacattagaagtcatagtctttgagatcaacttcattttatctgtgacaaattttttcttgttttgattcagatacctttttgtttgtttgtctttagaaacggggtctcactatattgcccaggctggactcaagcatcccaggcaatccttctgcctcagcctcttgagtacctggggctttaggcatgcaccaccacacctggcctgattcagataccttttgtgacaccaagctgctggtcatctaaaccatatgccttccattcatttaaaccatctacaggagaggaatttgtgtaaaacaaatgtttaaaattcaacacacacaagacctaggttgtcattgtgaaatgtgtaatatgaaatgtaaaaaatacgtgagataccttaggtcatcagtgagatgagatgcatcactttgacagctggttggcaaatgttgtctttgccaccaagcacaaattcagtggcatactttcacacatcaggtgatctgtcactcagcttcttgattgctctctgttatggtatacatttaagccatatttttgcaagtcagtatataactttgtttactgtttctattatatatttaattttggaaagtcaatataagcatcaaacatatttatatatatttttatacaaccttattgatgtctctggaacattgaccattccattgtactgagtttggaaaaatgccagattcaaccatgtacacattataaagcttagcctgtttcctcctcgaagctctttactgccccggtgtatctgattttccaatattgagaaatgctctggcatttagtatgaataacatattttatactttatttacagtgttctgttgttttccaattttgtgtgtgtgataaatcctttctctaccagtaggattatctctcaaattgtatactttccatgacagaatatcaaaacaaagcacaaagaagtcatttagcaattacctgacatgtgttgctcagaacctaagatactgtcagaaagttttgctatgtgcaatatttttctctaaaagtatagacaatttaactttttaacttaggctcatgtgaggatatgaacactagttgagcaagaatgtgtttatgtcatttcaggatttggtgacatttggggatgtggctgtaaatttctctcaagaggaatgggaatggctgaaccctgctcagaggaatttgtacaggaaagtgatgttggagaactacaggagcttggtatcattgggtaaggacatgtccccttaattcagaatctgtacatgggactgagctccaatgtaatatttgggaaacctctgacgtgcttcactaaatttccttttcttgtgcttcccaaaataggttgaatttgtagaattggcagcttcatcttccccattcttattcctcagctccctcccattattctcccaccttcttgatgatgcagaaacttgatcttatttatagacctgcctaattccccttttgttttttgtaagcaggagtttctgtttctaagccagatgtgatctcattattggagcaaggaaaagagccctggatggtgaagaaggagggaacaagaggcccatgccctggtgagtgagagagaaatagggagacagaagccattgccaggaaaagctcagcaattctgaaagatttcagttcataattgacgtttcctgggtagctcttcttaaagactcaaagcctgggaagaaatattgaggcatctttagtatgagctcctcaatttgttctctctgtctatattctctcacaagttacagtcttctctgacagtaatcttctctgataacccattttcctattgttggatccagatgtcacagcatctccctgtccttgccttttagttttatacaagttgcttggtttcattttttaaaaatccaggtgcctgtaatcccagctctttgggaaaccagagtgggtggatcacttgagcccaggagttcgagaccagcctgggcaacatggcaaaactaaaaatacaaaaaaaaaaaaaaaaaaaaaattagccaggcctggtggcacgcgcctgtaatcccatctatgtgggaggctgaggtgggaggatcacctgagcctgtgatctgagatcgcgcccctgcactccagcctaggtaacaaagcaagagcctgtctaaaaaaaaaaaaagccaggttatttttgtttgttttgttttgtttttccctttctcagttactcattccttttagattgaaggattgatgcatttatttatttatttattcttttaccaagcctcattgactttatgttttgagaagaggattctgctaaattcttgggattattcagaggcttatacaccaacaaagaaaaaagaaagccaattttattttcaattctgggtaactagaagatgataacacttaatagaaacaatcagaagcaaaagttgataggaggaaagatgaaaaatttggctgtggacataagagggttatatatataagatgaggagagttccaagcaaagaaatgcaacatgcaactggtttagaagatgggggctcagaaaaatagaatgatttagagatgtcagtgtgaatgaatgagatcactggtcttaagagtttgagagataaagcctgatgctgaggcctttgtggggaagtgaatctttgataactttctcagtatcctccatggtaaatggcatctctataatttgtctttggttaatatatatatatttttagatgaggtcttgacctgttgcccaggctggagtgcagtggtgcactgcaacctccacctcccaggttcaagcaattctcctgcctcagccacccaagtagctgggattacaggcatgcaccactacgcccagctaatttttctgtattttaagtagagatggggtttcaccatgttggccaggctggtcttgaacttgtgacctcaaatgatctgcccacctgggcctcccaaagtgctgggattacaggcatcagccactgcccccagcctgtctttggttaaattttatgcattttaatttttctagataattgtccttttcatttaggttatcagatttcatgaatttgagcaaaataatctacaattagttttcttttatatgtataatggtttccaattttaattttttattttgtg[131 bp omitted]aaaccctgcctctactaaaaatacaaaaattagccaggtgtggtggcaggctcctgtaatcccagctacttaggaggctgaggcagagaatcacttgaactcaggaggtggaggttgcagtgagctgagattgcaccactgaactttagcctgggagacagagtgagactccgtctcaaaaaaaaaaaaaaaaaagaatacatttattaggttgctctactcataaatcagtttatttttaaagaactagcttatggatttatgtattcatattcttttccaattttgtgtttttttctgtactaattcataaaatattttctccttactaattctttccttctaattttcttatttattttgatttccatagtgctgaaatgagagcttaatctattaatttaattcttttatttagtaatgagattattaaggactacgaattttcctctaagtttatctttgtctatctcctgtagattctgatacttagtgtttttgttactgctgttcatactagataatctaccttaaacatttttttctttcacccagagttgtttaaaagagagttttctggttttattgtatttgatcagacagtgtgaaggaattatttacatacagtaaactggatacatataaattgtacagtttgatgacacttgcatatacccatgaaactgtcaccacaatcaagacacatttagtatttctatcaccccaaaagattgcgtgtgtctctttccatctatcctactctccactcccagttccaaacaaacatgaatctgatctttattttttattaatttgcatctaaagtaaatggaatcattcagtatgtattttgttatgtctggcttatttcactcaggataatcatcttgaaatttatctgtattgttgcatgtatgaatgcaacatttcatttatccattcacctggtgatggacatttgggttgtttccagtttggggctattataaataaagttgctatgcagctgtcatgtacaggactttgtgtgaacatatatttttatttttggggggtaaatacttaagatggaagaactgagttatatgataggtatatgtttaactctgttagaaactgtcagttttctgaaggaattataccattcttctagcagtgtatgagacttccagttaatccacattctcaccaaatcttggtatcgtcagtagtatttttaattttagtcattctaaaggttgtattgtggttttaatatgcatttctggaatgactaataatgttgagcctcttttcatatgtttactggccatgcatataacttttatgaaaactttgttcaaacatttttcccatgttttattggattgtttatcttatgatttgtaagagttctgtatatagtcttaaaacaagttctttatcatttatatgtattggcttatatgtatgccaattatggcttgcctttttgtttttctgctgccacctctgttggaggcaaagtttgcagtttttgtaaaatccaatttattaatttgtcttggttggtgcttcttatatctaagaaattcttgctactcccaggtcacagagatatttttctaggagttttaaggttttagcatttatatttagctctgtgaatgattttgagctaatttatgtgtcttgtgtgaggtaaaggttgaggttcatttttttttccatatggatatacagttgccccaagaccctttgtcaggaaagactttcccttcctaattctatcacctatcaccttgctacttttcctgatcattacttgaccacatatgtgtgggtatggttctggaatgtcttctgttccattgatctatatgtctattgtctcaccagttccatactgccttgattactgtagctttgtagtaagttttgataccagatagagcaatttgtaaaattgccttgactgttttagatcatttgcatttcatataaattttagaatgaagttgagaatttctgctcaaaaaacttagatttttgttgggattacattgattctgtatgtcaattgaaaaaaactgacctcttaacattgagtcttctaatataagtatggtttattaagccatttattagtctttaaaaatgtcttgaagttgggtgtaatggtgtgcgctggtaatctcagctacttggggggctgatttggaaggattgcttgagtccagaacttggagactagcctggacaacatagcaagactctgtctgaaaaagaaaaaggaaaaataataaaatttatcttaagaatattttgcagtatccagtgtagtggtactctgttaaattttttttcctaagtctgtaatagttttttgagtgctataataaatagaattttttttaacaattcagttttctaatagtttgccactagtaggcagaaatgtaaattgatttttatattagctttacatcttatgacctcgctagattcatttaatggttgccctcacagttattttgtaggtccatgaggattttttggatggacaatcatgctatctacaaatacagtttttttttccttctgatccttataccttatttttcttgatatattgcaatggctaggacctcctatataatgtgtaattgaaggggtaagaggaaatgtacttgtgctgtttcaatcttaagggaaaacgtattctgtcttttactattaagtcagtgtaagctgtcagtttttcttagatgtccttgatcagtttgaaaacgttactttctattcctggtttgctgataatttttataataaatggatcagatactatttctacatctgttgaaatgatcatgtgattttttttctctttaaccttttaatatggtgaattacattgattgattttcaaatgtgaaaccaatcttgcatttttgggataaactctacttggtcaagatcatgctgttaatattttcctagatttcatttgcacagttttattaaagattttgccttatgtacatgtgctacattggtctgcaggtttactttttttttttttttttttgagatggagtcttgctctgtcaccaggctggagtgcagtggctcaatctcagctcactgcaacctccacctcccgggttcaagcgattctcctgcctcagcctcccgagtagctaggactacaggcatgcgccaccatgcccagctaatttttgtattttttagtagagatggggt[143 bp omitted]tatcaagataatactggccttatgaaaacaagttggaaagtgtttatctttctctattttctgacagtttgaataaaatggtattatttcttctttaaatatttgatagaattcaccaatgaagacatctgggcctgaagtattttttacataacagctttaatggatatagggttaatcaggttatctgatttttgttgaatcagctttggtaggctgtgtctttcaagagatttctgtgtttcatctgagtttttcaatttattaatgtttttaaaaaacagctgtaggctatgtaatgataactcctctggtgttgctgatatctgttctttttttcttgataactgatgttttaaaagaacctacttttgttttatttcctctgttgttgtttttctatattgttaattttctttcttaactttttcttctactttccttaagtttactttggtcttttcctcacttcttgaggtgacatcttagattattgatttttagacttttagttgttttctaacataagcatttgaaaactgtagatttttcctttaagtaccattttagctgtatcccacagattttgatatgttgtactgtcattatcaaccaagatattttctaatttctcttgtatactctgacccatgatttatatagaaatgtgtttagttctcagatgtttggagttgactaggtattattgatttaaaaatcaataacctctaacctctgttgaggttagagagcatactcatcttggtttcggtactttgggatttatggagacttggtttatgccccagaatatagtctatcttatttactgaacacattgtgtgcactcgaatacatgttgtacaagtgtttggtgtagtgttgtataaatataaattagatcaaagtagttaaccctgttgagatcctctttgttactattttttcctagttttgtcagtttctgagcaaagcatgtgttagttgcctattatgactataggattacctatttcttacactttcaatttttgttttatgtattttgaggcgttatattaggtgcacagacattaaagattatttctttctgatgaattgatccttttattactatacgtctctatctttggtaatactcagttttaaagtctattttatctgacgtgaatatagttaatctagccttatgcttactgtttgcatgttacatctttctttatctgtattattaatgtattcttatatgtaatgtgaggtttctataaacagcatataattgtgtctttcattttgttgattcctataagttctgccttttaactgaataaggagttcattaatatttaattatttatataatttgagttgagtctactattgttttctctttaatatttctcattaaaaaatatttgctcatctctatcttcttttgggatgtttgaatattttttataattccattttattttatctgctggcttgttgtacctttttatattatgcttccagtgggtgctatagtgcaatgatgctcaaaatgtcgtcttgagaccagcagcaccacctgtgaatttattagaaacgaagattctcagccctcaacctccactaactcaatcaaaaactctgtgtgtggggtatagcaatctgtagtttagcaagttttatctaattctgatacactctaaaatgtaagaatcatgcctgtaacgattataatatctatccttaacttttcagtctaatgagaattagtgtttttacttccttattatagttttatcaacttaattctgggtttaattagatcattgctccttggcagtcatttcatatttcttttttgacccatcagtcttcagaatttaattttcatgttgactttttatagggcattcatgggtgtgatttgcaactgtttagagaggaaagtggaatttggaagggcactgaggcagcacagcggaattagcagcctcaatttaagtatgttgccttcagattcttttccttccaaatatcattatccactgtaatatttaagtttagtggtaatattccatttggtttcagacatttaccccattcatgcaagcatgtcattctaataagaggatgaattagtgtggtgttttatgtcttattgattcagtatttattccaaagatactaagcaccttctatctgtccaggctattttaggcaatgggtgttcaagggtgagaaaaaaacttcctgcacatgaatgtttacattctaataagaatagagagtaagttaacatgtaatatgatattaaataagttaagtgctatgaagtgcaaagcaggaggaaagagaaacataagagtgtggaatacttcatattggatgttcggcaaaggccatactgaagaggtaatatgtgaacagaacctcaagtgaagaagtgcaatgagagaagggatcaagcagatatctgtggaaagtgcttttcaggcagagaaacagcaagtctggtgctcctaaagtggaaataaagtgaattcccatatgactgaagtggagtaagcaagcaagggagtagtagaagataagatcagagaacaccaggtcatgtagagtttcataaaccaaggtaggaattttcactttattctaaatgtagtaagaaacaggaaaatcttaagcagaaaaatgaagtgatctgatttggaactggacaggggaaggcagactaagttctgtgctaggttagtaagaccaagcagtttgatacaaaactactcttatatgaaggcatcttagctgcagggatcaattgaaagtttacatatggttggagtttgttacatagaaaatgattttctggaagacttttttctaactacagatgtttacccatagagttttatgaacaatatgaacaaccataaagttttacatgtatcctaataaggatattaatactgcctactgttgtttttaggcctgggattccaatggagtttttaatcatattaacatcataaaactggcttataaaagataacttagcttgaatgcaggataacctatgacaagagaggaaaggtgtttgaagtctgttattaacttagatataaaaagatgattatgatttttagaataccaccttcattgttttgttcttatatttaccttactggttgtcaatgattatttccttaatcaactctcttaaattcttattatttataatgtcattattttagaatgcattataagcttttaaatcctttaacttgtgatgtattttattcacgtttttgttttagaaatttcttctagtgaattaaatacaaaagtcatttgtttcttgatatcttttagattgggagtatgtatttaaaaacagtgaattttcatcaaagcaagagacatatgaagaatcatccaaagttgtgacagtgggagcaagacatcttagttatagccttgactatcccagtttgagagaagactgtcaaagtgaggactggtataagaaccagctgggaagtcaagaggtacatcttagtcaattaatcatcactcataaagaaatccttccagaagttcaaaataaagaatataacaaatcttggcaaacattccaccaggatacaatctttgatatacaacagagttttcccaccaaagaaaaagcacataagcatgaaccacaaaagaaaagttaccgaaaaaaatctgttgaaatgaaacataggaaagtctatgtagaaaagaaacttttgaaatgtaatgattgtgagaaagtcttcaaccagagctcatcccttactcttcatcagagaattcatactggagagaaaccctatgcatgtgttgaatgtgggaaaacgttcagccagagtgcaaacttggcgcaacataagagaatacatactggagagaaaccctatgaatgtaaagaatgtaggaaagccttcagccagaatgcacacctggcccaacatcagagagttcatactggagagaaaccttatcagtgtaaagaatgtaaaaaagccttcagccagattgcacacctgactcagcatcagagagttcatactggagagagacctttcgaatgtattgaatgtggaaaggcctttagtaatggttcatttcttgctcagcatcagagaattcatacaggagagaaaccttatgtgtgtaatgtgtgtgggaaagcctttagccatcgtggatacctaattgtacatcagagaattcatactggagagagaccctacgaatgtaaggaatgtaggaaagccttcagccagtatgcacaccttgctcaacatcagagagttcatactggagaaaaaccttatgaatgtaaagtatgtaggaaagccttcagccaaattgcataccttgatcaacatcagagggttcatactggagagaaaccctatgaatgtattgaatgtgggaaggcctttagcaatagttcatcacttgcacaacatcagagaagtcatactggagaaaaaccctatatgtgtaaggaatgtaggaaaacatttagccagaatgcaggccttgctcaacatcagagaattcatactggagagaaaccttatgaatgtaatgtttgtgggaaagcatttagctatagtggatctcttactctacatcagagaattcatactggagaaagaccctatgaatgtaaagattgcaggaaatctttcaggcagcgtgcacatcttgctcatcatgagagaattcatactatggagtcattcttgactctttcctctccctcaccctccacatcaaatcagttgccaagacctgtaggtttcatctcctgaatatttctggaatccacctcttgaatccatttccatcccatcatccttgtccaatgcacattaatatatttgacatgggatactcgagtagctttctaattggtctccttgtactcaccattgtctctgtcagatgtccacattgcaaccaaatttgtatttttaaaaatatgtttaatctcatttctccctcattaaaatccctcagtggcatcccatggtttttaagttaaagcacacattcttcaaaatagcctaaaaacctagcctctaacaccttgttccaggttaccttccaaagtttctatcttgtgtcactatccatctcattctctgaatacttatccaggattaagatacatattccaggatcaaaaagacctgggttccaatctttgcacttccatttcctgccctctaatttgggggcagcagtttgtgctttgtaagcttcagtcttatttatagtgtgggaataataatggttctacctcagaagttaatagaagaatgaaataatgcatgtaaattgctcagcagcgtgcctagcataaagtaattactcaaaccataatgtaaagtaaaaagataaccatactatacatagaaagccaatcatctcagccatgattatctcagaaataaaaagagatgcagcagctcaggactgagagattgtgaagtttttttttttttaggaatggtaggcatttttctaaaagtaggtgaggagggtatctaacagtaggatttacattagagtccatgatatagggtaagatggtggcttgtatcagcattcactggatatttaacagttctaagatgctaatgtcttattttaaaagtctttttttttgagatggagtcttgctctgttgctcaggcttgagtgcagtagtgcaatcttggctcactgcaacctccgcctcctgtgttcaagtgattctcctgcctcagcctcctgagtagctgggattacaggcctgcaccaccacgcccagctaatttttgtatttttagtagagagagggttttgacatgtcggccaggcttttctctaactcctgacgtccggtgatccgcctgccttggcctcccaaagtgctgggattacatgcgtgagctaccgtgcctggcctaaaaagtcatttttaataagacagtttactgagatgtattcatcatttacatgtaaacaaaggcaaaatcgaaattaaaaagaaatcttgaaacaagtcagtaaccaatgatgagtagaaaataaagtataagtttgaacccctgttctaaatctgggtgaatgaattatatcaaatctatgtcatttaaaataataaaggttgttaaattactaaaatttcaaaactagtgaagaaaagaaaccaaaactgtaggtcagttctcataaactggcccacaaacatgtttgattctgtatgcattaagtttaaaatacatatgaataccttcagcagaccatgtgttttccctttctccaacattcaaaccactccctgattctttacatctgacctcttttaatattacttcctgaccccagaattcttttggcatataatcaatgcagtgatcaattcacatgtgactatagatacaaacagaatgacgaaagtttaatggaggatgaaaaagaagacaaataaatattttatcctttatatggtaagacagattcactatcatactgatgtcagtagcccatgaattaatttacagattctacctaacaaaattctaataaattttgtaaggttttaacatgtatgtgtgaacatacatattcatgctgttacacatataaagaaaattataacaaaagtgacctataccatcagtggtttaacagttttggaaaaatttatcgtgctctatacaacaattcattccatatgtgaaagttactttcaagtgctttatctaaatgtggaacaaacagtgattagaggagtctgtgacacactctaatcatggaatgagactggccttcctaaacatgagattcagaagcctccccacctcctgtcaacaagtcatagatttgactgtataagaactttataaagcttttatatgatcaaagatagtaaaagatacaatattttttaaacctaagaatgggagaaaattattgcagcacatataaactatggaattcatatccttaacataaaattgctcataaaaatcccttaggaaatgacgcttttctccagctcatagtcaaaggatatgaagaggcaacaggtgaccaataaatatgtggtaagtactaaatctccctaggatcagaagaaatacagtttaggccaatgaaatactatttttttcaatatcagattaataaaactgcattgaaagcatacaaaaagagatactatgcactaatttaaaagagcatgagtttgtacaaactctggtaggcaatttgtcaacttcagaattttaattgggaaaagtagaattttattttgaagttcaaaaactcggcacacaatgtctttccctccagattctattatacacatagaacaatgtaaatgattcttaaaaaaaaaaaaaaggtgaggcttttgagtggatgaaataattttgtaaaaggcaaaacagggaagagtgttcatgaattgtagcagaagatgctgcatgttatatgcgaatgaccgaagggttttaaaaatggaatctagtctgcccaaaggatccctagagaagttcaggcttggagttggcttatgtacaggctgtggcttctaagaagacatgatgaaaagcctcttgaagcctttgtatgtgaaagttatgtcagtagcccttgccaaaagcctcctcactctcccctctcttgtataagtaaattgaatgggatccttatttcacaccattaacaagtataagttctaactgaataaaaatctaaatgtaaattactaaagcaaaagtattagaaaaaatatagtgggatatgttaacgactttggtgtcagacacgtgtttctaaaatattcaaataccataaaggaaaagattgataaaattgactgtgtcaaaaaatagtgtgctttggctgggtgcggtggttcacacctgtaatcccagcacttcgggagactgaggcaggtggatcatgaggtcatgagttcaaaaccagcctggccaagatggtgaaaccccatctctactaaaaatacaaaaaattagctgggtgtggtggcaggcatctgtgatcccagctacttgagaggctgaggcaggagaatcacttgaaccatgtggcagaggttgcagtgagccaagatcatgccactgcactccagcctgggcgatagagtgagactctgtctcaaaaaaaaaaaaaaattattgtgcttttggccaggcatggtggctcacgcctgtaatcctagcacgttgggaggccgaggcgggtggatcacctgacctcaggagttagagaccagcctgatcaacatggtgaaaccctgtctctactaaaaatacaaaattagctgggtgtggtggggctacctgtaaacccagccacttgggaggctgaggcaggtgaatggcttgatcccaggaagcagagaatgcagtgagctgagatcgcgacattgcactccgacttgggtaacaagagtgaaactcggtctcaacaacaacaaaaattagtgtgcttttaaagaaagttaaaagataagcaacaggaaggaagaaacacataacggacacatgtaagaacacatataagtcaataagtaaaggacaactaagcaagtatataaatgtgcaaagatgagaatggccaaattgtggaagacatacagatgtctaagtctctgcttaacctcattagtattaagttatgcaaatttgctcatttattatttatttattttgtagagatgaagtctcactttgttgctgaggctggtctcaaactcctgggctcaagtggtcctcttccctcagcctcccaaagtgctggaatcacgggtggagagattcaaattgagacagtataataccagatattggtcgtggtgtggagacaggatttctcatcacagctactttagaggcagtgaagtttttaaaatgctcactatagccactttgtagggtacagttagtatttgaaacactgaaaacaacctaaatttctatcagtaaagtaatgactaggagttctatgctggagtttaaaagaatgggctgataatattgatacgaatttgactaaaggacttactggttgaaaatgtaaaaatttcgcatacactattgtatatttaaaaatatattttatttctaatgcatttatagaagtatgcaaatgcttagtgaaagttctgaacagacacccaactgataaatgtttcctctaggaagggactggtattggatgctctggtcaaaggaagatttagtgttatttgtactgtttgaagttttaaacatcaatgtaataattaaaaaaaaaactttaacatgaaaaaattgagtttacaacgaactggacacctagaatgaaaagttggcagtctaagttaaaactcttttttggaatttggagcatctctccttgacttgccagcccttcccaggcatacagataccctggtaacccttccaatttaggcaaacagacctacagtggaaatatacaaaggaccccctggcatttacctatggtaatcaaaccatgtaatacttaaatggcaactgatagctaagtatcatcacttgaagaaaaccaccagcataataaggaccaagagatataattgaatcctgagtggggaaagtcatgtaataacagaagaaaatgaaaaattgattttagcctgcaatttgaaactacaaaataaagggaacaattagataagaactaagaaataaaaaaatacactgtaataaatttaataaaggttagaaagaaaagaaaccttagatgcataaattaaaaagaaaaatgagaaaaagggacatggaaatttacaaggtccaatatcaatgttttgggaaaaatttcacagaaaatataagaatgtatcgaatgactgagaatctttctaaactgaaacaaggcaagcatgttcagcttgggttagctcactgaatgttgtataggatgaactaggaaaaccacaacaggaaaatccagaaatatgcttgtgaaatttcagaatattaaagaagaaaacattctaaaagctttcaaaaatgattaggtcacctaaaaaagaacaacagtcaagatgattttagcccttcctcctatcataaatattggatagaatacagaatagcactttccaacttatgagataaaattactttggacctagaagtctatacttggccaacaatatttaaagcatgaggccaaatattgatgttttcagtcatggaatttatttccattatccaggatattaaaggagtcactcaagcaaaatgtagatgaaaaaggaagaagacagcaggataggctgaagtgaacagtggctgtaacccaagaaactggagttgaggattacaaggatacccacttggcaataagtgtagaaaacaatccaaccaaattattggtagactaagaatccagggagccagtgaagaaaaactttttgaaggatggaatgagttccattaaacagaattcatatgaagttggaggatcttagcaatatgatggagataaaattttgttcatacgagaaggaaagaaagataattactggctctgggaaagacaaagaaaaaaccaaactagatatcatagtcttaacgttaagcaactccccatgaaatgttgcatgattttagaaaactgaaaaaggaaaatccatttgatatgacgatagttccctttgagtgagtactaagatcataacattggatgtgtagaggaggaatgtaatctttacatattacttggctctggctcttcagagaataacaaatgttggtagtaatgcaatgctattttattttatacatttagaatatagaaatcactgaagtattatctgtaacataaatatctagtaatgtgaaaggcagaatatagctgattgattggatggtggaaggtagattggaaaatgaaagattgaagcaaggataagtggcaataatctcattgtgcagaggagattcaggagatctgcctaaagttgacagaataagaaaatacaggttagctatatttcaagttaaaaatgcaacaaatgtgataaactcacatgggatgacttacatcctttcctttcataaaagacttataaagagcgtataaaaataaatccagaaacagcaacagtagtcaggattgatagaaaccaaacaaaattagtttaggaaacaggttattgattcttgtaactaaaaagcattgaacatgtatggcatagtgttaggctggatttaagtgctcagacttatcagaggtttgtaactcagctctgctttcagtagtttccttctctccaggttctgtctcttggtgggaaagaaatggcatctgaggatattagacttaaaatgtccatagaatatttaatctcaaaagtagggcaatatctctgtctctctgcctccgtgtcaatccctgggaggaaaatatgatttgtttcagttttggctgtgtgcccactctgaaccagtcattgggtccatggtatgtggggtactctagccagcctgtgtcaagtgtacatgcctcttccagagagactgaatcactgaactgaccaattcacaaaaaaaacacacagaattggggctggttgaagggaggttgagaatcagctctcataatggcaaaacctgacctgaattgacatgagggtatttattgacattgatcccagttagtataaacattcatatctttttcttcagaaatattaatttgttcaattcaggggtgctgcctcagactctgtagcataggtaagttacatgtctgtgggtcaaatggacatagcacacagtggcttgtaattaaactgtcttgccagtaatccagagaaggttgcatgataaagtaaccccagcagaaagaggctggggctgtggtgacaagaattggtttagcatcacctggatccagcatgccaggggacttcaggggagttccttttaagacactccacagaaggcctccctcacagcaagtgtaagagatacaacccacagaaagtgagacagttcacgggggttccttttaatacactccacagaaggtctccctcgcagaaagtgtcagagatacaactcacagaaaatgagatggtttgcatgtataaaggaaagcagatctgatctatagagactgtggccttcaggtaaggaacttcattttcctactcccttatcctattctccacagcagagtggtagactggtgtattcccacaaggaaacaagtttgaatatatgtgtgagaagcctttaaaaatatttactaacttctgcatttaacaagatggaattaagtagtttctgtttgtttctcctttctgaaaccaagttaaagcaacaagagtaagaaatgcatgtagaggcttcgtctttaatgaagtgaagaaacatctataattctgagcttcaaaatccacaaagaggtgcggctaaatgtggtgagaatcctgggaaagaaactactgctgcattgaggagcacagaattttcctaaagcagcagcatatctggaagggcaaaagaaagggcaccttggttgcagccacaacatcacttcaaacattctggctttggaagcactcgtaaactctattatagttgcagagtgtcgtgtgagtgacaggagggcttaaggaggaaatgca[146 bp omitted]ggtggtgggcgcctgtagtcccagctactcaggaggctgaggcaggagaatagcgggaacctgggagttggagcttgcagtgagccaagatcccgccactgcactccagcctaagcgactgatcaagactccgtctcaaaaaaaaaaaaaggtttatcatgtaatagaggaaataaaatactgccagtgatgtgcaagaatgcaaagtaaagactaatccttgctactcaaaagtctgcgccatggaataacagcatcagcatcacctgagagtttgttaaaattccagaatcttgggccttaacccagacttaatcattcagaatctgcagttttacaagatctccagatgatctgtacacattaaggtttcagattcactggggtaaaaccaattatctgctagtgtaaagcactgtcctttgataaataagtagatcaggaaaagctcatttcattcaaaaattaaaaactccagccattcgcagatcttatcgataatggtaagctcaaaattacagaacaccccttcattaaaactgaacaaaatgaaaagaatgtgctagcatcatggaatgagaaaattgcactacctcatatcacatacttgaaaatataatacagaaatagtaagttcacactacaacaatgtgccagcatctttggtagtctctgccctctgggaaaagcagagcgagagaaagtctccataatggaggaaaagtcagaagaaaatctgaaaaaatttcactgatatatcctgatagttgtgtggggaaggggggagatgcaggcagcaatgaacaaacatacataaaattcctcttaagaatcctacttcactctagatagtagtttggataggaaagacaagttggtaatatatgttaaatatacctacgttttgacccaataatttattctctaaaaatattggtaaatctttacaaaagcatatgtacaagaatgttaattgcgatattatttaaaaaaattaaaaatcctagattcctcattattaccgccctctctaaatgcttatctgagatctacacttctggcaaagatggagtcctagggaataatttaatctcccacctgaaatactaaaaaacgacaccaggcaataaaataatgatccctgagaaattagaaacaaatgaggtgagtcctatgatttccccagacaactgcatgtagtttccaggctgtggtacagatctccacgaattaaggtgatggagctgggagtcagggagatcaaggtggctagagttcccaggatagagagtttgagaggagacagctctcagaaaagggaaaaaaaagcatctagtaatctacagtgtgttcctctttttttttttttttttttatctgagtacagatcagaatatggatgtgaagcaactacctgaaattggggaaagaacttaaagaactacaaggagaaataaacaaatccagaattataattggagatttcagcatgcctctcaatagaacatataaatagaaaaaatagtgaggatattgaagacttgaatattatcaccaacttgacctaactgacatttgtggaactattcaccccaagaagagtaaaacacacattcttttcaaatgaacccagaacattcacccagacagacaataattccagaccttaaaacacatatcagtaaactgaaaaggactgaagtcatacaaaatatgttttctaaccagaatggatttaaatcaataacagaaaagtaattagaaaacacccaaatatttagaacaaaagagcacacttttcagtaaccatatttctaagaagaaatcaaaagggaaaataaatattttgagttgaatgaaacttagagaaaagtacatcaaaatgtatgggatgtaccacagtacttggaaagaaatacagtggcactaaatgccaatgttacaaaacaaatgactcaaatcagtgactcctatttccacctaacaaattagaaatagaagagcaatgaaacccaacgttaacacaagaatggaaataataaaaatcagaatggaagccaatgaaatagaaacctgaaaaacaaaagctggttctttgagaaggtcaatgaaataaacaaaaaaattgcagacaattaaaaaagagattatacaagttatcactatctggaatggcagatgtgatatcactacaaatgatagttattaaatgaataaaagaatgttatgaactttatgcaaataatttgacaatttaaaaattcttgaaagaagctaacaaggttta[138 bp omitted]atggtgaaaccccgtctctattaaaaatacaaaaaaattagctgggcgtggtggtgggcgtctgtagtcccagctactcaggaggctgaagcaggagaatggcatgaacctgggaggcagagcttgcagtgagccaagatcccggcactgcactccagcctaggcgacagagcaagactctgtctcaaaaaaaaatggaatttgtaatttaagccttccaaatattttcagatgtctgtgtttactgcaactgtaattctggtatagtcaaggaacatagtttgcaaaataatttttttaatttatcaatatttatactctgtcttggtaaatgtttcatgaacacttaaaaggaatgtgtaccctgcctggattgtttggaatattttatattaacaaatgtcaaccaggtcaagttggttgattatgttgttgaggtcttctatatcttttttttttgtctacttgttctattaattaccaagaggagtgatgaagtctccaatgacaattgtcagtttgtctttctctcttttcagttctatcatttttccttgcaattcaatgtgtactcatttagaattacattttcccggccaggcgtggtggctcatgcctgtaatcccagcactttgggaggctgaggcaggtggatcacctgaggtcgggagttcaagaccaacctggtgaaaccccatctctactaaaaatacaaaaattagccaggcatggtggcaggcacctgtagtcccagctacttgggaggttgaagcaggaaaattgcttgaatccgggtggtggacgttgcagtgagctgagattgcgccattgcactccagcctgggagacaggagtgagacgaaactctgtcttaaaaaaatcaatcaataaataaatacattttcccagtaaacagaacttttatcattatgtaatctcactctttatccctgattgtattccttgttctgaagtctacttcatctgatagtaatatagtcatttctgcttttttgttaatgtttgcgtggtgtatctttttcccaccatttttctatgcctttatatttaaagtatgtttctggtagacagcatatagttggatactgctttttcattcaatcatagaatctctgtcgtttaactggtatatttagaccatttacatttgatatttttaaatatatagttagattaaaatctccaccttgttaactctatcctaattgttctgttctttagtttttgttctatttttgccttctatgatctaaatgaccatttttaataattctattttatattattgtttacatctcattgaacattttcagttgttacttctttaattggaatatacattcaaataatacacaacttaacatgttagtattttatatattcccattttctccgacatccattatgcttatcatattttactttcatatgctgtttacatggtacatttttactctaagacagccagttactttttaagataagtttttaaagttattaccttcatgtattccatttccgcatctcttcatttctttatgtatctccaaatgtctgctgtgtttcatattccttctgtttgaagaacttttcttgtagagtaggtcttctcttaatgtattattttctcagttttgtttctctgagagtatttctctatcagtttgaaagattttcatgagcatttcatgaagacagattttttccttcagctcttaaaagatgccattacattgtcctctggcctgcaatacttctgataagtctgctgtaattttcttaactttgttcttctatatgtaattttttcccctctctagcttgcttcaagattattttcagtagtttgaacataatatggctggggtggtgtgtgtttgtgtgtgtgtgtgagtgattttaatatttaccttccttgaggttctctgagcttcatagatttgtgttttctgggttcataaattttggaaacatattggccattatgtcttcaaatatttcttctgtcccatttattctgtatcttctgggattccaattatgtgtatgtgttggaccaatggatattttctcagagctcttggattctctgttccttcttgtcctaccctaccccacttatgtttcagtttgagtaacttttattgtcctaacgtcaagttcatttactttttccttgactatgtcaagtatattgatgagcctgttgaagacaattgttcatgtgcttattgagttttttcatttctagtatttccattttattctttttgttattgtttgagactgagtctcgctctgtctcccaggctggagtgcagtggcgtgatctcagctcactgcaagctccgcctcccgggttcccgctattctcctgcctcagcctcccgagtagctgggactacaggtgcccaccaccacgcctggctacttttttttgtattttttagtagagacggggtttcaccgtgttagccaggatggtctcgatctcctgagctcgtgatccgcccaccttggcctcccaaggtgctgggattacaggcgtgagccaccacgcccagccccattttatttttatagtttttgtgtctctgctcaaattatccatctaatcttgcctgttgtgcattttccattataactcttaagatactactcatagttcctttaaattccatgtcagtccaacagctatgtatttctgagtctagttctgatgaattttgtttcttggtggggtaaggtgttcatttttgcatttttgtatgccttgcattttttttttcctgaaagccaagtatcttctgtagaacaatagatatgaaggtaaatggatttaattcctggaaagggcatgtctttctatgtagcctttagtgtgtgggaggtggatgggtaagatttttataattatagctaggaattgaggaaggtttatggtttgttgttgctgtggttataagttcaccataggtttcagatatgaatagtgattccttatctttagggtccgaactggttttcccaagggtctatctcaatgtcagggtgatcttcaggtttaggtcccattggattatgcttcagatagcccatctatactaatatattttcattcattcaaatacttattgagtgctaaccattgaattatgtgtcattgtactaaacgctggaacttgtaactccccaaatactttattattgtttgccattattttatccatctgtaattttctctttagctttccaacttttgtgtgcctagcaaattcacattcttcctttaatattatctgcaaaaacaatccctgtccccatacctccatcaccatgaagtttatcatcctcttctccgtactacctatgcaccttatacagaattccatattttattacctgaattccctggtaaactgtaagtgtctgctggcaagaacagtgtcttattagtttacatatccacaggatttagcagtgattggtccagggtgtttacatgcacaacaaatgtgcagcgaaaatatttgctaatgaaagctggaaatctataggcatctattaaaagcaaaatactgtaataatgggctctcttacaacagtctaggagtaaagcaaaacatttttcttgccagttaagttttcaggactttaaaaaaacacaaagttgatttccttcttagtttggatatattttttaaattcatgtaatgcaaaataatttaaataataaatgattcggcctattaggatataattgagttccaagcagttgggaggacacatgaacccaaagttactttacctttattgcactttcacaaatgcctttaagagcttaagaataggagagaatagacaaaactagatgaaatgagaatttttgactgggccagaaataaagcagtgaggatatgcaattctcacaagtaattccaagttaagtttaactgtatcatgtattgccattctaatgctctcttgaaatccccaagaggagcaagaaatgcaataggcaatgagataagcctgaggaaattaggtgactgtgggcagggcattctcttgcttctccctagtcttcaggtgtgtcacaattcatttgggactgacatgtatttgtatggcagattggcagaggaattaacaagctagagggtgtgtgtagaaaagagggggaaaaaagacctgcctctccatgagttacctctgtgctgtttgctcacccatttgctccaaggggtggatttttatgcttgctttacaaatacgaaagaacaagtttaaatgggaagttagttgtactatcctgtatgcatgctcacccctcacaatttggattgttgttttatcaattgtggtcaaagttaggatgacctaacccatatacattccacacattccacaaagtcatcttaaacttaaggtattctcaaaaataacttttacagaaggaaaacttaaacagaagagcccaactgtgtatgatccaattacaaaaaagttatctgattttatttcttatatatttggcacaaacagcagagactgaaagctactacacatgttgaactgctgacaggaaaagaacccagtagataaatctaggctttccactccatatattagctggggctgccataacaaaacatcatagactgggtggcttaaacaacaatttacttctcacagttctgaagtctggaagtctgagaacaggtcgccagcatggttaggttctcgtagggttctcttcctgttctgtagacagctggcttcttcctgcatcctcacatggtgcagagagcaagcaggctttctgatgtctttttgagacgtagtctcgctctgtcgcccagggtggagtacagtggcgtgatcctggctcactgcaacctccgcctcctgggttcaagcgattcttctccttcagcctcccgagtagctgggactacaggcacatgccactgtgcctggctaattttttgtattttttttcagtggagacggggtttcaccgtgttagccaggattgtctcaatctcctgacctcatgatccactcgccttggcctcccaaagtgctgggattacaggcatgagccaccgggctcagcctgatgtctcttcttataaaggcactaatcccatcacgagggctccaccctcatgacctcatctaatcctaattgcctcccaaatgcctcatttccaagtaacatcacattgatggtgaggattttaacataattagttttgggagggacataaacattcagtccataacaactcatattacaccacttattgcataccagtattgttacatgaaaataccaatgtttactcatataaatatagatgatttatttccaaataaaacaatactgatttctcctggctctgaaatcctcattcttcactatatcttggttcttttactgatagcttgtctcagccaagttagacgttcacaccatgaagatcatatatcctcatatccgtggagatggtaaagtaaggtttctactgttacacaccattatgagtgacaactttatctacctaaagactcacttttctttattctcacccacaagtttgtcagctgaaagtggcaccctgttttgccgagaagttccttatatttgataattctagatctgagaaacagactcaaattcttttttctgtgaccttaaatcaggctcagagccctataatggacttcacaattctattttgttgtatgtgaccaataaattatctttaaaactatgctggaagtaaaatatcggtaattttttttttttttgacacagagtcttgctctgttgcccagactggagtgcagtggtgcaatctctgctcggtgcaacccccacctcctgggttcaagcgattctcctgcctcagcctctccagtagctgagattacaggtgcgcaccaccacgcccagctaattttgtattttttagtagagacagggtttcaccgtggtctcaaactcttgacctcgtgatccgcctgtctcagcctcccaaagtgctggggttacaggtgtaagccactgcgcccagccagtaattcttatcaaatgaaaaatgatcttcattcacaatgactgaccaaacttctgagtttccttcagttaatttcaaatcctgaggtcaaaatcaccaatgacttttgctctttggctttcaaagtgggacatatcatcaaatggtcccatatacacaaaatttacattatagacaaatacatatttgccatatgtttgatagcctcattcgttgattttatagatttaaaacaaccttaggctttttcttcagaatgtgtattctgatgtcgaatcagggatgaactccgactatatgccttcccacatttactacattcatagggtttctctgaagaatgacttctctgatgtcgaataaggtctgagccactgctaaatgccttcccacattcattacattcatagggtttctctccagtatgacttctttcatgtagaataagagatgtgcgctgactaaaggccttaccacatgttttgcatgtatatggcttctctccagtgtgaattctttcatgttgggcgaggtgtgcactctggctgaaggccttcccacactgatcacattcatagggtctatcttcagtatgaattctcttatgtcgtgtgagagatattcggtggctgaaggcttttccacattcctcacactggtagggtttttctccagtatgaattctttgatgttcaataagaaatgattggcggccgaaaactttactacatttattgcatttgaaaggtttctcttcagaatgaatattctgatgtattttaaggtttgcagttccagaaaacatcttcccacattccttacactcaaatagtttctttttctttgtatgaactttctgatgttgaataagggatgaatgccgattgcagaccttctcacatttattgcatctgtatagtttttctccattatgaattcttagatgcagaataagggttgaaagccgcctgaagaacttgtcacatttatcacatttgtacggtttctctgaagtgtgaattctctggtgaagcatcaggggtgaaatcctattaaataatttcccacattttctgcatttaaaaggattctctaaatggtgacttctttgctgtagactctgacttaaggccttcgcattttcagggattttctctccagcatgaattcttttatgtacaacaaagactgatttctttttgaagcctctcccacatttattatatttatgtgttttctttccattgtgaattttcttatgaagtaaaagggatgacatctgattgaaggcttttccgcactttctgcactggcagacattcccaacaacatgaattttctgatgtatattgaaagactgacattgactcaaggccttcccacagtcaagaatttcctttccatcatgaattctcatatgtagaataagggttgttctttgattgaagctttccccacatttattgcattcatggcttttctttccactgtgaattctctgatgaagtaggatggatgagatctgtctgaaagcttttctacaattactgcattcaaaaggcttctctcctgtatgaatgttctgatgaagtttaagagagaagcttcgactaaaggttttaccacagtcattacattttaaaggtttcttccctgaatgccctttcttaggttttactaggactgaatttttgttgcagccactctttcgtgtaggagctttttgttgtgcagaaactagtttctggcagatgctttgcccagatttgttgcattgatttggaggtaacttcttggtctcacatttagaccccgagtctgaaagacataaaggaattaaatgtttctccttttccatgctgaaaaaatgaagattctacaatataaatgtaattatcattattaatcacaacaacaattatgattaccaaaacataactttttagtgttttattgtggttttgatgactatactaaaggctttacagagatatttaataaccagagttcagaagagtgtaatttgaaaatgaataagattttatttatacgataacttttatgccatatacggcacattgaactccacaggttgttcaatggataaatgtatgtttattagagaatgtgtccagaaaaggtaagtctacagagacagaagataagtggttgcctggggctcaaggtaggaatggggattaactgaaaatggacatgaagaatcttacaggggtgataaaaatgttctaatactggatcatattgatggttacacactctgtaaatttatccaaaatcatttaattatattctagatatagtgacttttatgatgtttacctcaataaagttgtagattttaaaaaatgtattcttaagatcaaatttaaaaagaactagtaaaaattagaattgagtacagtcacgggttgcttaacaatgggaacatgttgtaagacatgcattgtcaggcaatttcatcattgtgcaaacatcttacagtagatttacataaacctagatagtatagcctactatacacctatgttatattgtatagcctgttcctaggctacaaacctgtacatgacgttactgtattgaatcctgtaggcaattttaacactatgataagtatttatgtatctaaatatacataaatgtagaaaaggtacagtacaaataacagttttatgatcttatagaaccatggccatatatgtagtctgttgttgactggactgaaacatcattatgcagcatatgactgtatttagatatttacaaaggtgaagtctttagcaagaagcaggaaaagctcagaaaaataggtaagagattagactaaaagaaggaatctattttgtagtaaaatagatcaatatggctggcatagggtgccaaagtccaaggtgatataaaataactacttgtatggcaaactgactataaacctgagtgaatgtggcatgataaacacaggctttagaactatgctatccaatatagtagccattagtcacctgtagctactgaggaattgaaatgtggctggtttgaggtatactatgagtataaaacatatgccagactgtgaaaatttactacaaaaaagtataaagtatctcattgtaaaaatgctggttatatgatataatatgttggatatattaggttaaatacatatattactaaaattaattttacctgtttgtattaggaagttcctatattgctataaataaatacttgagtgggtaatttataaacaaaagaggttcaattggctcctggttcagtaggctgtacaagcatggtgctggcacctccttggcttctggggaggcctcagtgagctcttactcatggtgaaagacgaagtaggagaaggcacatcacatggtgaaacaaggagagagagtgtggaggaggtgccacatattacaacgatcagattttgtaagaatcactccctattgctaagacaccaccaagggaatggtgctaagccattcatgagaaacccacccccatgatccaatcacctcccacagaccccacctccaacactgaggatgaaatttcaacatgagatttggtgagaaatccacccccatgatccaatcacctcccaccagaccccacctccaacactgaggattaatttcaacatgagatttggtgagaaacccacccccatgatccaatcacctcccacagaccccacctccaacactgaggatgaaatttcaacatgagatttggtgagaaatccacccccatgatccaatcacctcccacagaccccacctccaacactgaggattaaatttcaacatgagatttggtgagaaatccacccccatgatccaatcacctcccacagaccccacctccaacactgaggattaaatttcaacatgagatttggtgagaaacccacccccatgatccaatcacctcccacagaccccacctccaacactgaggattaaatttcaacatgagatttggtgagaaatccacccccatgatccaatcacctcccacagaccccacctccaacactgaggattaaatttcaacatgagatttggtgagaaatccacccccatgatccaatcacctcccacagaccccacctccaacactgaggattaaatttcaacatgagatttggtgagaaacccacccccatgatccaatcacctcccacagaccccacctccaacactgagtattaaatttcaacatgagatttggtgagaaatccacccccatgatccaatcacctcccacagaccccacctccaacactgaggattaaatttcaacatgagatttggtgagaaatccacccccatgatccaatcacctcccaccaggccccacctccaacactgaggattaaatttcaacatgagatttggtgagaaatccacccccatgatccaatcacctcccaccagaccccacctccaacactgaggattaaatttcaacatgagatttggtgagaaatccacccccatgatccaatcacctcccacagaccccacctccaacactgaggattaaatttcaacatgagatttggtgagaaatccacccccatgatccaatcacctcccaccaggccccacctccaacactgaggattaaatttcaacatgagatttggtgagaaatccacccccatgatccaatcacctcccaccaggccccacctccaacactgaggattaaatttcaacatgagatttggtgagaaatccacccccatgatccaatcacctcccaccagaccccacctccaacactgaggattaaatttcaacatgagatttggtgagaaatccacccccatgatccaatcacctcccaccagaccccacctccaacactgaggattaaatttcaacatgagatttggtgagaaatccacccccatgatccaatcacctcccacagaccccacctccaacactgaggattaaatttcaacatgagatttggtgagaaatccacccccatgatccaatcacctcccacagaccccacctccaacactgaggattaaatttcaacatgagatttggtggggacacagatccaaaccatatcactggttttagatttttatttgaatgtggatactaaagattttttcagtacatatgtggctcacattatatttctatttcataggtgtgctttaaaggcagacattactgaattaactgaggtgtttttcatttaactgcataatcttgtgacacacttgttaactctattaccataagcatattatcttgaaaatatagataataatcacgtacctcacaaggttttcatgagaattagaaataatgtgcgagatttctggcacatgctatgacctctaatctgccattccagtattcaaaaagctgagaaccaaagtcttctttccttttttcttttcctttttgaatacatatttggagtgaaaccccatctgaaatgcaatgaggctattcatagcctccatttattgctcttaggaagtctagtctttgcagctatctcaatgtgtttgattttggggtactgctccagcccctgctgggtatgttatgccacacatagtatatgacctgttcacctttctaaaatctgcaccattctgaattctg
